(19) United States
(12) Patent Application Publication
(10) Pub. No.: US 2022/0281984 A1
(43) Pub. Date: Sep. 8, 2022

(54) ANTIGEN-BINDING PROTEIN CONSTRUCTS AND USES THEREOF

(71) Applicant: Mythic Therapeutics, Inc., Waltham, MA (US)

(72) Inventors: Alexander J. Nichols, Lincoln, MA (US); Brian P. Fiske, Cambridge, MA (US); Nimish Gera, Waltham, MA (US)

(73) Assignee: Mythic Therapeutics, Inc., Waltham, MA (US)

(21) Appl. No.: 17/630,824

(22) PCT Filed: Jul. 30, 2020
(86) PCT No.: PCT/US2020/044263

§ 371 Date: Jan. 27, 2022

Related U.S. Application Data
(60) Provisional application No. 62/880,449, filed on Jul. 30, 2019.

(51) Int. Cl. C07K 16/28; A61K 47/68; A61K 51/10; A61P 35/00

(52) U.S. Cl. CPC C07K 16/2863; A61K 47/6849; A61K 51/103; A61P 35/00; C07K 2317/92; C07K 2317/56; C07K 2317/31

(57) ABSTRACT

Provided herein are antigen-binding protein constructs capable of specifically binding MET or an epitope of MET presented on surface of a target mammalian cell, wherein said antigen binding is pH-dependent. Provided are also uses of said antigen-binding protein constructs.

### CROSS-REFERENCE TO RELATED APPLICATIONS

[0001] This application claims priority to U.S. Provisional Patent Application 62/880,449, filed on Jul. 30, 2019. The contents of that application are incorporated herein by reference in its entirety.

### TECHNICAL FIELD

[0002] The present disclosure relates to the field of biotechnology, and more specifically, to antigen-binding molecules.

### BACKGROUND

[0003] Antibody-drug-conjugates have been designed to combat a variety of diseases. One particular advantage of this approach is the ability for antibody-drug conjugates to have cytostatic or cytotoxic effects. Despite years of development, improved antibody-drug conjugates are desired.

### SUMMARY

[0004] The present invention is based on the concept that antigen-binding protein constructs can be generated that display enhanced efficacy (e.g., one or more of an increase (e.g., a detectable increase) in toxin liberation in a target mammalian cell, an increase (e.g., a detectable increase) in target mammalian cell killing, and an increase (e.g., a detectable increase) in endolysosomal delivery).

[0005] Provided herein are pharmaceutical compositions including an effective amount of an antigen-binding protein construct (ABPC) including: a first antigen-binding domain that is capable of specifically binding MET or an epitope of MET presented on the surface of a target mammalian cell, where: (a) the dissociation rate of the first antigen-binding domain at a pH of about 4.0 to about 6.5 is faster than the dissociation rate at a pH of about 7.0 to about 8.0; or (b) the dissociation constant (K_{D}) of the first antigen-binding domain at a pH of about 4.0 to about 6.5 is greater than the K_{D} at a pH of about 7.0 to about 8.0.

[0006] In some embodiments of any of the pharmaceutical compositions described herein, the ABPC is degraded in the target mammalian cell following internalization of the ABPC by the target mammalian cell.

[0007] In some embodiments of any of the pharmaceutical compositions described herein, the ABPC includes a conjugated toxin, radioisotope, drug, or small molecule.

[0008] Also provided herein are pharmaceutical compositions including an effective amount of an antigen-binding protein construct (ABPC) including: a first antigen-binding domain that is capable of specifically binding MET or an epitope of MET presented on the surface of a target mammalian cell; and a conjugated toxin, radioisotope, drug, or small molecule, where: (a) the dissociation rate of the first antigen-binding domain at a pH of about 4.0 to about 6.5 is faster than the dissociation rate at a pH of about 7.0 to about 8.0; or the dissociation constant (K_{D}) of the first antigen-binding domain at a pH of about 4.0 to about 6.5 is greater than the K_{D} at a pH of about 7.0 to about 8.0; and (b) the composition provides for one or more of: an increase in toxin liberation in the target mammalian cell as compared to a composition including the same amount of a control ABPC; an increase in target mammalian cell killing as compared to a composition including the same amount of a control ABPC; and an increase in endolysosomal delivery in the target mammalian cell as compared to a composition including the same amount of a control ABPC.

[0009] In some embodiments of any of the pharmaceutical compositions described herein, the first antigen-binding domain includes one of (a) through (d): (a) a heavy chain variable domain of Telisotuzumab with one or more amino acids substituted with a histidine, where the heavy chain variable domain of Telisotuzumab includes SEQ ID NO: 1; and/or a light chain variable domain of Telisotuzumab with one or more amino acids substituted with a histidine, where the light chain variable domain of Telisotuzumab includes SEQ ID NO: 2; (b) a heavy chain variable domain of Emibetuzumab with one or more amino acids substituted with a histidine, where the heavy chain variable domain of Emibetuzumab includes SEQ ID NO: 146; and/or a light chain variable domain of Emibetuzumab with one or more amino acids substituted with a histidine, where the light chain variable domain of Emibetuzumab includes SEQ ID NO: 147; (c) a heavy chain variable domain of hucMET27Gv1.3 with one or more amino acids substituted with a histidine, where the heavy chain variable domain of hucMET27Gv1.3 includes SEQ ID NO: 304; and/or a light chain variable domain of hucMET27Gv1.3 with one or more amino acids substituted with a histidine, where the light chain variable domain of hucMET27Gv1.3 includes SEQ ID NO: 305; and (d) a heavy chain variable domain of P3D12 with one or more amino acids substituted with a histidine, where the heavy chain variable domain of P3D12 includes SEQ ID NO: 502; and/or a light chain variable domain of P3D12 with one or more amino acids substituted with a histidine, where the light chain variable domain of P3D12 includes SEQ ID NO: 503.

[0010] In some embodiments of any of the pharmaceutical compositions described herein, the first MET-binding domain includes one of (a) through (d): (a) a heavy chain variable domain including a CDR1, a CDR2, and a CDR3 of SEQ ID NOs: 3-5, respectively, with collectively a total of one or more amino acid positions in SEQ ID NOs: 3-5 substituted with a histidine; and/or a light chain variable domain including a CDR1, a CDR2, and a CDR3 of SEQ ID NOs: 6-8, respectively, with collectively a total of one or more amino acid positions in SEQ ID NOs: 6-8 substituted with a histidine; (b) a heavy chain variable domain including a CDR1, a CDR2, and a CDR3 of SEQ ID NOs: 148-150, respectively, with collectively a total of one or more amino acid positions in SEQ ID NOs: 148-150 substituted with a histidine; and/or a light chain variable domain including a CDR1, a CDR2, and a CDR3 of SEQ ID NOs: 151-153, respectively, with collectively a total of one or more amino acid positions in SEQ ID NOs: 151-153 substituted with a histidine; (c) a heavy chain variable domain including a CDR1, a CDR2, and a CDR3 of SEQ ID NOs: 306-308, respectively, with collectively a total of one or more amino acid positions in SEQ ID NOs: 306-308 substituted with a histidine; and/or a light chain variable domain including a CDR1, a CDR2, and a CDR3 of SEQ ID NOs: 309-311, respectively, with collectively a total of one or more amino acid positions in SEQ ID NOs: 309-311 substituted with a histidine; and (d) a heavy chain variable domain including a CDR1, a CDR2, and a CDR3 of SEQ ID NOs: 504-506, respectively, with collectively a total of one or more amino acid positions in SEQ ID NOs: 504-506 substituted with a histidine; and/or a light chain variable domain including a CDR1, a CDR2, and a CDR3 of SEQ ID NOs: 507-509, respectively, with collectively a total of one or more amino acid positions in SEQ ID NOs: 507-509 substituted with a histidine.

[0011] In some embodiments of any of the pharmaceutical compositions described herein, the first antigen-binding domain includes one of (a) through (d): (a) a heavy chain variable domain that is at least 90% identical to SEQ ID NO: 1, where the heavy chain variable domain includes a histidine at one or more positions in SEQ ID NO: 1 selected from the group consisting of: 26, 27, 28, 29, 32, 97, 98, 99, 100, 101, 102, 103, and 107; and/or a light chain variable domain that is at least 90% identical to SEQ ID NO: 2, where the light chain variable domain includes a histidine at one or more positions in SEQ ID NO: 2 selected from the group consisting of: 25, 28, 29, 30, 31, 32, 34, 35, 36, 37, 54, 55, 59, 60, 95, 99, and 101; (b) a heavy chain variable domain that is at least 90% identical to SEQ ID NO: 146, where the heavy chain variable domain includes a histidine at one or more positions in SEQ ID NO: 146 selected from the group consisting of: 31, 50, 51, 52, 53, 54, 56, 57, 59, 98, 99, 100, and 103; and/or a light chain variable domain that is at least 90% identical to SEQ ID NO: 147, where the light chain variable domain includes a histidine at one or more positions in SEQ ID NO: 147 selected from the group consisting of: 25, 26, 29, 32, 33, 51, 91, 92, 95, 96, and 97; (c) a heavy chain variable domain that is at least 90% identical to SEQ ID NO: 304, where the heavy chain variable domain includes a histidine at one or more positions in SEQ ID NO: 304 selected from the group consisting of: 27, 34, 35, 50, 51, 52, 54, 55, 56, 57, 58, 59, 60, 61, 62, 63, 64, 65, 98, 99, 103, and 105; and/or a light chain variable domain that is at least 90% identical to SEQ ID NO: 305, where the light chain variable domain includes a histidine at one or more positions in SEQ ID NO: 305 selected from the group consisting of 26, 30, 31, 34, 36, 54, 56, 57, 60, 93, 95, 99, and 101; and (d) a heavy chain variable domain that is at least 90% identical to SEQ ID NO: 502, where the heavy chain variable domain includes a histidine at one or more positions in SEQ ID NO: 502 selected from the group consisting of: 27, 29, 30, 32, 33, 34, 50, 51, 52, 53, 57, 59, 98, 100, 101, 102, 103, 106, and 107; and/or a light chain variable domain that is at least 90% identical to SEQ ID NO: 503, where the light chain variable domain includes a histidine at one or more positions in SEQ ID NO: 503 selected from the group consisting of: 25, 29, 31, 32, 33, 34, 35, 52, 55, 91, 92, 93, 94, 95, 96. 97, and 98.

[0012] In some embodiments of any of the pharmaceutical compositions described herein, the first antigen-binding domain includes one of (a) through (d): (a) a light chain variable domain of SEQ ID NO: 2, SEQ ID NO: 52, SEQ ID NO: 55, SEQ ID NO: 56, SEQ ID NO: 57, SEQ ID NO: 58, SEQ ID NO: 59, SEQ ID NO: 61, SEQ ID NO: 62, SEQ ID NO: 63, SEQ ID NO: 64, SEQ ID NO: 65, SEQ ID NO: 66, SEQ ID NO: 67, SEQ ID NO: 71, SEQ ID NO: 72, SEQ ID NO: 75, SEQ ID NO: 79, SEQ ID NO: 81, SEQ ID NO: 131, SEQ ID NO: 132, SEQ ID NO: 133, SEQ ID NO: 134, SEQ ID NO: 135, SEQ ID NO: 136, SEQ ID NO: 137, SEQ ID NO: 138, SEQ ID NO: 139, or SEQ ID NO: 140, and/or a heavy chain variable domain of SEQ ID NO: 1, SEQ ID NO: 13, SEQ ID NO: 14, SEQ ID NO: 15, SEQ ID NO: 16, SEQ ID NO: 19, SEQ ID NO: 40, SEQ ID NO: 41, SEQ ID NO: 42, SEQ ID NO: 43, SEQ ID NO: 44, SEQ ID NO: 45, SEQ ID NO: 46, SEQ ID NO: 50, SEQ ID NO: 82, SEQ ID NO: 83, SEQ ID NO: 84, SEQ ID NO: 86, SEQ ID NO: 87, SEQ ID NO: 89, SEQ ID NO: 90, SEQ ID NO: 94, or SEQ ID NO: 111, where the first antigen-binding domain does not comprise (i) a light chain variable domain of SEQ ID NO: 2 and a heavy chain variable domain of SEQ ID NO: 1; (ii) a light chain variable domain of SEQ ID NO: 2 and heavy chain variable domain that is not one of SEQ ID NOs: 13-16, 19, 40-46, 50, 82-84, 86, 87, 89, 90, 94, and 111; or (iii) a heavy chain variable domain of SEQ ID NO: 1 and a light chain variable domain that is not one of SEQ ID NOs: 52, 55-59, 61-67, 71, 72, 75, 79, 81, and 131-140; (b) a light chain variable domain of SEQ ID NO: 147, SEQ ID NO: 190, SEQ ID NO: 191, SEQ ID NO: 194, SEQ ID NO: 197, SEQ ID NO: 198, SEQ ID NO: 200, SEQ ID NO: 201, SEQ ID NO: 209, SEQ ID NO: 210, SEQ ID NO: 213, SEQ ID NO: 214, SEQ ID NO: 215, SEQ ID NO: 284, SEQ ID NO: 285, SEQ ID NO: 286, SEQ ID NO: 287, SEQ ID NO: 288, SEQ ID NO: 289, SEQ ID NO: 290, SEQ ID NO: 291, SEQ ID NO: 292, SEQ ID NO: 293, SEQ ID NO: 294, SEQ ID NO: 295, SEQ ID NO: 296, SEQ ID NO: 297, SEQ ID NO: 298, SEQ ID NO: 300, or SEQ ID NO: 301, and/or a heavy chain variable domain of SEQ ID NO: 146, SEQ ID NO: 159, SEQ ID NO: 164, SEQ ID NO: 165, SEQ ID NO: 166, SEQ ID NO: 167, SEQ ID NO: 168, SEQ ID NO: 170, SEQ ID NO: 171, SEQ ID NO: 173, SEQ ID NO: 182, SEQ ID NO: 183, SEQ ID NO: 184, SEQ ID NO: 187, SEQ ID NO: 217, SEQ ID NO: 218, SEQ ID NO: 219, SEQ ID NO: 220, SEQ ID NO: 221, SEQ ID NO: 222, SEQ ID NO: 223, SEQ ID NO: 224, SEQ ID NO: 225, SEQ ID NO: 226, SEQ ID NO: 227, SEQ ID NO: 228, SEQ ID NO: 230, SEQ ID NO: 231, SEQ ID NO: 232, SEQ ID NO: 233, SEQ ID NO: 234, SEQ ID NO: 235, or SEQ ID NO: 236, where the first antigen-binding domain does not comprise (i) a light chain variable domain of SEQ ID NO: 147 and a heavy chain variable domain of SEQ ID NO: 146; (ii) a light chain variable domain of SEQ ID NO: 147 and heavy chain variable domain that is not one of SEQ ID NOs: 159, 164-168, 170, 171, 173, 182-184, 187, 217-228, and 230-236; or (iii) a heavy chain variable domain of SEQ ID NO: 146 and a light chain variable domain that is not one of SEQ ID NOs: 190, 191, 194, 197, 198, 200, 201, 209, 210, 213-215, 284-298, 300 and 301; (c) a light chain variable domain of SEQ ID NO: 305, SEQ ID NO: 352, SEQ ID NO: 356, SEQ ID NO: 357, SEQ ID NO: 360, SEQ ID NO: 362, SEQ ID NO: 364, SEQ ID NO: 365, SEQ ID NO: 367, SEQ ID NO: 368, SEQ ID NO: 371, SEQ ID NO: 372, SEQ ID NO: 374, SEQ ID NO: 378, SEQ ID NO: 380, SEQ ID NO: 428, SEQ ID NO: 429, SEQ ID NO: 430, SEQ ID NO: 431, SEQ ID NO: 432, SEQ ID NO: 433, SEQ ID NO: 434, SEQ ID NO: 435, SEQ ID NO: 436, SEQ ID NO: 437, SEQ ID NO: 438, SEQ ID NO: 439, SEQ ID NO: 440, SEQ ID NO: 441, SEQ ID NO: 442, SEQ ID NO: 443, SEQ ID NO: 444, SEQ ID NO: 445, SEQ ID NO: 446, SEQ ID NO: 450, SEQ ID NO: 451, SEQ ID NO: 453, SEQ ID NO: 457, SEQ ID NO: 462, SEQ ID NO: 463, SEQ ID NO: 465, SEQ ID NO: 470, SEQ ID NO: 472, SEQ ID NO: 473, SEQ ID NO: 474, SEQ ID NO: 476, SEQ ID NO: 479, SEQ ID NO: 482, SEQ ID NO: 483, SEQ ID NO: 485, SEQ ID NO: 490, SEQ ID NO: 492, SEQ ID NO: 494, SEQ ID NO: 496, or SEQ ID NO: 499, and/or a heavy chain variable domain of SEQ ID NO: 304, SEQ ID NO: 313, SEQ ID NO: 320, SEQ ID NO: 321, SEQ ID NO: 322, SEQ ID NO: 323, SEQ ID NO: 324, SEQ ID NO: 326, SEQ ID NO: 327, SEQ ID NO: 328, SEQ ID NO: 329, SEQ ID NO: 330, SEQ ID NO: 331, SEQ ID NO: 332, SEQ ID NO: 333, SEQ ID NO: 334, SEQ ID NO: 335, SEQ ID NO: 336, SEQ ID NO: 337, SEQ ID NO: 340, SEQ ID NO: 341, SEQ ID NO: 345, SEQ ID NO: 347, SEQ ID NO: 381, SEQ ID NO: 382, SEQ ID NO: 383, SEQ ID NO: 384, SEQ ID NO: 385, SEQ ID NO: 386, SEQ ID NO: 387, SEQ ID NO: 388, SEQ ID NO: 389, SEQ ID NO: 390, SEQ ID NO: 392, SEQ ID NO: 393, SEQ ID NO: 395, SEQ ID NO: 396, SEQ ID NO: 397, SEQ ID NO: 398, SEQ ID NO: 399, or SEQ ID NO: 400, where the first antigen-binding domain does not comprise (i) a light chain variable domain of SEQ ID NO: 305 and a heavy chain variable domain of SEQ ID NO: 304; (ii) a light chain variable domain of SEQ ID NO: 305 and heavy chain variable domain that is not one of SEQ ID NOs: 313, 320-324, 326-337, 340, 341, 345, 347, 381-390, 392, 393, and 395-400; or (iii) a heavy chain variable domain of SEQ ID NO: 304 and a light chain variable domain that is not one of SEQ ID NOs: 352, 356, 357, 360, 362, 364, 365, 367, 368, 371, 372, 374, 378, 380, 428-446, 450, 451, 453, 457, 462, 463, 465, 470, 472-474, 476, 479, 482, 483, 485, 490, 492, 494, 496, and 499; and (d) a light chain variable domain of SEQ ID NO: 503, SEQ ID NO: 550, SEQ ID NO: 554, SEQ ID NO: 556, SEQ ID NO: 557, SEQ ID NO: 558, SEQ ID NO: 559, SEQ ID NO: 560, SEQ ID NO: 562, SEQ ID NO: 565, SEQ ID NO: 569, SEQ ID NO: 570, SEQ ID NO: 571, SEQ ID NO: 572, SEQ ID NO: 573, SEQ ID NO: 574, SEQ ID NO: 575, SEQ ID NO: 576, SEQ ID NO: 697, SEQ ID NO: 698, SEQ ID NO: 699, SEQ ID NO: 700, SEQ ID NO: 701, SEQ ID NO: 702, SEQ ID NO: 703, SEQ ID NO: 704, SEQ ID NO: 705, SEQ ID NO: 706, SEQ ID NO: 707, SEQ ID NO: 708, SEQ ID NO: 709, SEQ ID NO: 710, SEQ ID NO: 711, SEQ ID NO: 712, SEQ ID NO: 713, or SEQ ID NO: 732, and/or a heavy chain variable domain of SEQ ID NO: 502, SEQ ID NO: 511, SEQ ID NO: 513, SEQ ID NO: 514, SEQ ID NO: 516, SEQ ID NO: 517, SEQ ID NO: 518, SEQ ID NO: 519, SEQ ID NO: 520, SEQ ID NO: 521, SEQ ID NO: 522, SEQ ID NO: 523, SEQ ID NO: 527, SEQ ID NO: 529, SEQ ID NO: 538, SEQ ID NO: 540, SEQ ID NO: 541, SEQ ID NO: 542, SEQ ID NO: 543, SEQ ID NO: 546, SEQ ID NO: 547, SEQ ID NO: 578, SEQ ID NO: 579, SEQ ID NO: 580, SEQ ID NO: 581, SEQ ID NO: 582, SEQ ID NO: 583, SEQ ID NO: 584, SEQ ID NO: 585, SEQ ID NO: 586, SEQ ID NO: 587, SEQ ID NO: 588, SEQ ID NO: 589, SEQ ID NO: 590, SEQ ID NO: 591, SEQ ID NO: 592, SEQ ID NO: 593, SEQ ID NO: 594, SEQ ID NO: 595, SEQ ID NO: 596, SEQ ID NO: 597, SEQ ID NO: 606, SEQ ID NO: 621, SEQ ID NO: 659, or SEQ ID NO: 676, where the first antigen-binding domain does not comprise (i) a light chain variable domain of SEQ ID NO: 503 and a heavy chain variable domain of SEQ ID NO: 502; or (ii) a light chain variable domain of SEQ ID NO: 503 and heavy chain variable domain that is not one of SEQ ID NOs: 511, 513, 514, 516-523, 527, 529, 538, 540-543, 546, 547, 578-597, 606, 621, 659, and 676; or (iii) a heavy chain variable domain of SEQ ID NO: 502 and light chain variable domain that is not one of SEQ ID NOs: 550, 554, 556-560, 562, 565, 569, 570-576, 697-713, and 732.

[0013] In some embodiments of any of the pharmaceutical compositions described herein, the composition provides for: an increase in toxin liberation in the target mammalian cell as compared to a composition including the same amount of a control ABPC; and/or an increase in target mammalian cell killing as compared to a composition including the same amount of a control ABPC.

[0014] In some embodiments of any of the pharmaceutical compositions described herein, the composition provides for an increase in endolysosomal delivery in the target mammalian cell as compared to a composition including the same amount of a control ABPC.

[0015] In some embodiments of any of the pharmaceutical compositions described herein, the composition: results in a less of a reduction in the level of MET presented on the surface of the target mammalian cell as compared to a composition including the same amount of a control ABPC; or does not result in a detectable reduction in the level of MET presented on the surface of the target mammalian cell.

[0016] In some embodiments of any of the pharmaceutical compositions described herein, the target mammalian cell is a cancer cell.

[0017] In some embodiments of any of the pharmaceutical compositions described herein, the ABPC is cytotoxic or cytostatic to the target mammalian cell. In some embodiments of any of the pharmaceutical compositions described herein, the ABPC is: cross-reactive with a non-human primate MET and human MET; or cross-reactive with a non-human primate MET, a human MET, and one or both of rat MET and a mouse MET.

[0018] In some embodiments of any of the pharmaceutical compositions described herein, the ABPC includes a single polypeptide. In some embodiments of any of the pharmaceutical compositions described herein, the antigen-binding domain is selected from the group consisting of: a VH domain, a VHH domain, a VNAR domain, and a scFv. In some embodiments of any of the pharmaceutical compositions described herein, the ABPC includes two or more polypeptides. In some embodiments of any of the pharmaceutical compositions described herein, the ABPC is an antibody.

[0019] In some embodiments of any of the pharmaceutical compositions described herein, the half-life of the ABPC in vivo is decreased as compared to the half-life of a control ABPC in vivo.

[0020] In some embodiments of any of the pharmaceutical compositions described herein, the ABPC includes a second antigen-binding domain.

[0021] Also provided herein are antigen-binding protein construct (ABPCs) including: a first antigen-binding domain that is capable of specifically binding MET or an epitope of MET presented on the surface of a target mammalian cell, where: (a) the dissociation rate of the first antigen-binding domain at a pH of about 4.0 to about 6.5 is faster than the dissociation rate at a pH of about 7.0 to about 8.0; or (b) the dissociation constant (K_{D}) of the first antigen-binding domain at a pH of about 4.0 to about 6.5 is greater than the K_{D} at a pH of about 7.0 to about 8.0.

[0022] In some embodiments of any of the ABPCs described herein, the ABPC is degraded in the target mammalian cell following internalization of the ABPC by the target mammalian cell.

[0023] In some embodiments of any of the ABPCs described herein, the ABPC includes a conjugated toxin, radioisotope, drug, or small molecule.

[0024] Also provided herein are antigen-binding protein construct (ABPCs) including: a first antigen-binding domain that is capable of specifically binding MET or an epitope of MET presented on the surface of a target mammalian cell; and a conjugated toxin, radioisotope, drug, or small molecule, where: (a) the dissociation rate of the first antigen-binding domain at a pH of about 4.0 to about 6.5 is faster than the dissociation rate at a pH of about 7.0 to about 8.0; or the dissociation constant (K_{D}) of the first antigen-binding domain at a pH of about 4.0 to about 6.5 is greater than the K_{D} at a pH of about 7.0 to about 8.0; and (b) the composition provides for one or more of: an increase in toxin liberation in the target mammalian cell as compared to a composition including the same amount of a control ABPC; an increase in target mammalian cell killing as compared to a composition including the same amount of a control ABPC; and an increase in endolysosomal delivery in the target mammalian cell as compared to a composition including the same amount of a control ABPC.

[0025] In some embodiments of any of the ABPCs described herein, the first antigen-binding domain includes one of (a) through (d): (a) a heavy chain variable domain of Telisotuzumab with one or more amino acids substituted with a histidine, where the heavy chain variable domain of Telisotuzumab includes SEQ ID NO: 1; and/or a light chain variable domain of Telisotuzumab with one or more amino acids substituted with a histidine, where the light chain variable domain of Telisotuzumab includes SEQ ID NO: 2; (b) a heavy chain variable domain of Emibetuzumab with one or more amino acids substituted with a histidine, where the heavy chain variable domain of Emibetuzumab includes SEQ ID NO: 146; and/or a light chain variable domain of Emibetuzumab with one or more amino acids substituted with a histidine, where the light chain variable domain of Emibetuzumab includes SEQ ID NO: 147; (c) a heavy chain variable domain of hucMET27Gv1.3 with one or more amino acids substituted with a histidine, where the heavy chain variable domain of hucMET27Gv1.3 includes SEQ ID NO: 304; and/or a light chain variable domain of hucMET27Gv1.3 with one or more amino acids substituted with a histidine, where the light chain variable domain of hucMET27Gv1.3 includes SEQ ID NO: 305; and (d) a heavy chain variable domain of P3D12 with one or more amino acids substituted with a histidine, where the heavy chain variable domain of P3D12 includes SEQ ID NO: 502; and/or a light chain variable domain of P3D12 with one or more amino acids substituted with a histidine, where the light chain variable domain of P3D12 includes SEQ ID NO: 503.

[0026] In some embodiments of any of the ABPCs described herein, the first MET-binding domain includes one of (a) through (d): (a) a heavy chain variable domain including a CDR1, a CDR2, and a CDR3 of SEQ ID NOs: 3-5, respectively, with collectively a total of one or more amino acid positions in SEQ ID NOs: 3-5 substituted with a histidine; and/or a light chain variable domain including a CDR1, a CDR2, and a CDR3 of SEQ ID NOs: 6-8, respectively, with collectively a total of one or more amino acid positions in SEQ ID NOs: 6-8 substituted with a histidine; (b) a heavy chain variable domain including a CDR1, a CDR2, and a CDR3 of SEQ ID NOs: 148-150, respectively, with collectively a total of one or more amino acid positions in SEQ ID NOs: 148-150 substituted with a histidine; and/or a light chain variable domain including a CDR1, a CDR2, and a CDR3 of SEQ ID NOs: 151-153, respectively, with collectively a total of one or more amino acid positions in SEQ ID NOs: 151-153 substituted with a histidine; (c) a heavy chain variable domain including a CDR1, a CDR2, and a CDR3 of SEQ ID NOs: 306-308, respectively, with collectively a total of one or more amino acid positions in SEQ ID NOs: 306-308 substituted with a histidine; and/or a light chain variable domain including a CDR1, a CDR2, and a CDR3 of SEQ ID NOs: 309-311, respectively, with collectively a total of one or more amino acid positions in SEQ ID NOs: 309-311 substituted with a histidine; and (d) a heavy chain variable domain including a CDR1, a CDR2, and a CDR3 of SEQ ID NOs: 504-506, respectively, with collectively a total of one or more amino acid positions in SEQ ID NOs: 504-506 substituted with a histidine; and/or a light chain variable domain including a CDR1, a CDR2, and a CDR3 of SEQ ID NOs: 507-509, respectively, with collectively a total of one or more amino acid positions in SEQ ID NOs: 507-509 substituted with a histidine.

[0027] In some embodiments of any of the ABPCs described herein, the first antigen-binding domain includes one of (a) through (d): (a) a heavy chain variable domain that is at least 90% identical to SEQ ID NO: 1, where the heavy chain variable domain includes a histidine at one or more positions in SEQ ID NO: 1 selected from the group consisting of: 26, 27, 28, 29, 32, 97, 98, 99, 100, 101, 102, 103, and 107; and/or a light chain variable domain that is at least 90% identical to SEQ ID NO: 2, where the light chain variable domain includes a histidine at one or more positions in SEQ ID NO: 2 selected from the group consisting of: 25, 28, 29, 30, 31, 32, 34, 35, 36, 37, 54, 55, 59, 60, 95, 99, and 101; (b) a heavy chain variable domain that is at least 90% identical to SEQ ID NO: 146, where the heavy chain variable domain includes a histidine at one or more positions in SEQ ID NO: 146 selected from the group consisting of: 31, 50, 51, 52, 53, 54, 56, 57, 59, 98, 99, 100, and 103; and/or a light chain variable domain that is at least 90% identical to SEQ ID NO: 147, where the light chain variable domain includes a histidine at one or more positions in SEQ ID NO: 147 selected from the group consisting of: 25, 26, 29, 32, 33, 51, 91, 92, 95, 96, and 97; (c) a heavy chain variable domain that is at least 90% identical to SEQ ID NO: 304, where the heavy chain variable domain includes a histidine at one or more positions in SEQ ID NO: 304 selected from the group consisting of: 27, 34, 35, 50, 51, 52, 54, 55, 56, 57, 58, 59, 60, 61, 62, 63, 64, 65, 98, 99, 103, and 105; and/or a light chain variable domain that is at least 90% identical to SEQ ID NO: 305, where the light chain variable domain includes a histidine at one or more positions in SEQ ID NO: 305 selected from the group consisting of 26, 30, 31, 34, 36, 54, 56, 57, 60, 93, 95, 99, and 101; and (d) a heavy chain variable domain that is at least 90% identical to SEQ ID NO: 502, where the heavy chain variable domain includes a histidine at one or more positions in SEQ ID NO: 502 selected from the group consisting of: 27, 29, 30, 32, 33, 34, 50, 51, 52, 53, 57, 59, 98, 100, 101, 102, 103, 106, and 107; and/or a light chain variable domain that is at least 90% identical to SEQ ID NO: 503, where the light chain variable domain includes a histidine at one or more positions in SEQ ID NO: 503 selected from the group consisting of: 25, 29, 31, 32, 33, 34, 35, 52, 55, 91, 92, 93, 94, 95, 96. 97, and 98.

[0028] In some embodiments of any of the ABPCs described herein, the first antigen-binding domain includes one of (a) through (d): (a) a light chain variable domain of SEQ ID NO: 2, SEQ ID NO: 52, SEQ ID NO: 55, SEQ ID NO: 56, SEQ ID NO: 57, SEQ ID NO: 58, SEQ ID NO: 59, SEQ ID NO: 61, SEQ ID NO: 62, SEQ ID NO: 63, SEQ ID NO: 64, SEQ ID NO: 65, SEQ ID NO: 66, SEQ ID NO: 67, SEQ ID NO: 71, SEQ ID NO: 72, SEQ ID NO: 75, SEQ ID NO: 79, SEQ ID NO: 81, SEQ ID NO: 131, SEQ ID NO: 132, SEQ ID NO: 133, SEQ ID NO: 134, SEQ ID NO: 135, SEQ ID NO: 136, SEQ ID NO: 137, SEQ ID NO: 138, SEQ ID NO: 139, or SEQ ID NO: 140, and/or a heavy chain variable domain of SEQ ID NO: 1, SEQ ID NO: 13, SEQ ID NO: 14, SEQ ID NO: 15, SEQ ID NO: 16, SEQ ID NO: 19, SEQ ID NO: 40, SEQ ID NO: 41, SEQ ID NO: 42, SEQ ID NO: 43, SEQ ID NO: 44, SEQ ID NO: 45, SEQ ID NO: 46, SEQ ID NO: 50, SEQ ID NO: 82, SEQ ID NO: 83, SEQ ID NO: 84, SEQ ID NO: 86, SEQ ID NO: 87, SEQ ID NO: 89, SEQ ID NO: 90, SEQ ID NO: 94, or SEQ ID NO: 111, where the first antigen-binding domain does not comprise (i) a light chain variable domain of SEQ ID NO: 2 and a heavy chain variable domain of SEQ ID NO: 1; (ii) a light chain variable domain of SEQ ID NO: 2 and heavy chain variable domain that is not one of SEQ ID NOs: 13-16, 19, 40-46, 50, 82-84, 86, 87, 89, 90, 94, and 111; or (iii) a heavy chain variable domain of SEQ ID NO: 1 and a light chain variable domain that is not one of SEQ ID NOs: 52, 55-59, 61-67, 71, 72, 75, 79, 81, and 131-140; (b) a light chain variable domain of SEQ ID NO: 147, SEQ ID NO: 190, SEQ ID NO: 191, SEQ ID NO: 194, SEQ ID NO: 197, SEQ ID NO: 198, SEQ ID NO: 200, SEQ ID NO: 201, SEQ ID NO: 209, SEQ ID NO: 210, SEQ ID NO: 213, SEQ ID NO: 214, SEQ ID NO: 215, SEQ ID NO: 284, SEQ ID NO: 285, SEQ ID NO: 286, SEQ ID NO: 287, SEQ ID NO: 288, SEQ ID NO: 289, SEQ ID NO: 290, SEQ ID NO: 291, SEQ ID NO: 292, SEQ ID NO: 293, SEQ ID NO: 294, SEQ ID NO: 295, SEQ ID NO: 296, SEQ ID NO: 297, SEQ ID NO: 298, SEQ ID NO: 300, or SEQ ID NO: 301, and/or a heavy chain variable domain of SEQ ID NO: 146, SEQ ID NO: 159, SEQ ID NO: 164, SEQ ID NO: 165, SEQ ID NO: 166, SEQ ID NO: 167, SEQ ID NO: 168, SEQ ID NO: 170, SEQ ID NO: 171, SEQ ID NO: 173, SEQ ID NO: 182, SEQ ID NO: 183, SEQ ID NO: 184, SEQ ID NO: 187, SEQ ID NO: 217, SEQ ID NO: 218, SEQ ID NO: 219, SEQ ID NO: 220, SEQ ID NO: 221, SEQ ID NO: 222, SEQ ID NO: 223, SEQ ID NO: 224, SEQ ID NO: 225, SEQ ID NO: 226, SEQ ID NO: 227, SEQ ID NO: 228, SEQ ID NO: 230, SEQ ID NO: 231, SEQ ID NO: 232, SEQ ID NO: 233, SEQ ID NO: 234, SEQ ID NO: 235, or SEQ ID NO: 236, where the first antigen-binding domain does not comprise (i) a light chain variable domain of SEQ ID NO: 147 and a heavy chain variable domain of SEQ ID NO: 146; (ii) a light chain variable domain of SEQ ID NO: 147 and heavy chain variable domain that is not one of SEQ ID NOs: 159, 164-168, 170, 171, 173, 182-184, 187, 217-228, and 230-236; or (iii) a heavy chain variable domain of SEQ ID NO: 146 and a light chain variable domain that is not one of SEQ ID NOs: 190, 191, 194, 197, 198, 200, 201, 209, 210, 213-215, 284-298, 300 and 301; (c) a light chain variable domain of SEQ ID NO: 305, SEQ ID NO: 352, SEQ ID NO: 356, SEQ ID NO: 357, SEQ ID NO: 360, SEQ ID NO: 362, SEQ ID NO: 364, SEQ ID NO: 365, SEQ ID NO: 367, SEQ ID NO: 368, SEQ ID NO: 371, SEQ ID NO: 372, SEQ ID NO: 374, SEQ ID NO: 378, SEQ ID NO: 380, SEQ ID NO: 428, SEQ ID NO: 429, SEQ ID NO: 430, SEQ ID NO: 431, SEQ ID NO: 432, SEQ ID NO: 433, SEQ ID NO: 434, SEQ ID NO: 435, SEQ ID NO: 436, SEQ ID NO: 437, SEQ ID NO: 438, SEQ ID NO: 439, SEQ ID NO: 440, SEQ ID NO: 441, SEQ ID NO: 442, SEQ ID NO: 443, SEQ ID NO: 444, SEQ ID NO: 445, SEQ ID NO: 446, SEQ ID NO: 450, SEQ ID NO: 451, SEQ ID NO: 453, SEQ ID NO: 457, SEQ ID NO: 462, SEQ ID NO: 463, SEQ ID NO: 465, SEQ ID NO: 470, SEQ ID NO: 472, SEQ ID NO: 473, SEQ ID NO: 474, SEQ ID NO: 476, SEQ ID NO: 479, SEQ ID NO: 482, SEQ ID NO: 483, SEQ ID NO: 485, SEQ ID NO: 490, SEQ ID NO: 492, SEQ ID NO: 494, SEQ ID NO: 496, or SEQ ID NO: 499, and/or a heavy chain variable domain of SEQ ID NO: 304, SEQ ID NO: 313, SEQ ID NO: 320, SEQ ID NO: 321, SEQ ID NO: 322, SEQ ID NO: 323, SEQ ID NO: 324, SEQ ID NO: 326, SEQ ID NO: 327, SEQ ID NO: 328, SEQ ID NO: 329, SEQ ID NO: 330, SEQ ID NO: 331, SEQ ID NO: 332, SEQ ID NO: 333, SEQ ID NO: 334, SEQ ID NO: 335, SEQ ID NO: 336, SEQ ID NO: 337, SEQ ID NO: 340, SEQ ID NO: 341, SEQ ID NO: 345, SEQ ID NO: 347, SEQ ID NO: 381, SEQ ID NO: 382, SEQ ID NO: 383, SEQ ID NO: 384, SEQ ID NO: 385, SEQ ID NO: 386, SEQ ID NO: 387, SEQ ID NO: 388, SEQ ID NO: 389, SEQ ID NO: 390, SEQ ID NO: 392, SEQ ID NO: 393, SEQ ID NO: 395, SEQ ID NO: 396, SEQ ID NO: 397, SEQ ID NO: 398, SEQ ID NO: 399, or SEQ ID NO: 400, where the first antigen-binding domain does not comprise (i) a light chain variable domain of SEQ ID NO: 305 and a heavy chain variable domain of SEQ ID NO: 304; (ii) a light chain variable domain of SEQ ID NO: 305 and heavy chain variable domain that is not one of SEQ ID NOs: 313, 320-324, 326-337, 340, 341, 345, 347, 381-390, 392, 393, and 395-400; or (iii) a heavy chain variable domain of SEQ ID NO: 304 and a light chain variable domain that is not one of SEQ ID NOs: 352, 356, 357, 360, 362, 364, 365, 367, 368, 371, 372, 374, 378, 380, 428-446, 450, 451, 453, 457, 462, 463, 465, 470, 472-474, 476, 479, 482, 483, 485, 490, 492, 494, 496, and 499; and (d) a light chain variable domain of SEQ ID NO: 503, SEQ ID NO: 550, SEQ ID NO: 554, SEQ ID NO: 556, SEQ ID NO: 557, SEQ ID NO: 558, SEQ ID NO: 559, SEQ ID NO: 560, SEQ ID NO: 562, SEQ ID NO: 565, SEQ ID NO: 569, SEQ ID NO: 570, SEQ ID NO: 571, SEQ ID NO: 572, SEQ ID NO: 573, SEQ ID NO: 574, SEQ ID NO: 575, SEQ ID NO: 576, SEQ ID NO: 697, SEQ ID NO: 698, SEQ ID NO: 699, SEQ ID NO: 700, SEQ ID NO: 701, SEQ ID NO: 702, SEQ ID NO: 703, SEQ ID NO: 704, SEQ ID NO: 705, SEQ ID NO: 706, SEQ ID NO: 707, SEQ ID NO: 708, SEQ ID NO: 709, SEQ ID NO: 710, SEQ ID NO: 711, SEQ ID NO: 712, SEQ ID NO: 713, or SEQ ID NO: 732, and/or a heavy chain variable domain of SEQ ID NO: 502, SEQ ID NO: 511, SEQ ID NO: 513, SEQ ID NO: 514, SEQ ID NO: 516, SEQ ID NO: 517, SEQ ID NO: 518, SEQ ID NO: 519, SEQ ID NO: 520, SEQ ID NO: 521, SEQ ID NO: 522, SEQ ID NO: 523, SEQ ID NO: 527, SEQ ID NO: 529, SEQ ID NO: 538, SEQ ID NO: 540, SEQ ID NO: 541, SEQ ID NO: 542, SEQ ID NO: 543, SEQ ID NO: 546, SEQ ID NO: 547, SEQ ID NO: 578, SEQ ID NO: 579, SEQ ID NO: 580, SEQ ID NO: 581, SEQ ID NO: 582, SEQ ID NO: 583, SEQ ID NO: 584, SEQ ID NO: 585, SEQ ID NO: 586, SEQ ID NO: 587, SEQ ID NO: 588, SEQ ID NO: 589, SEQ ID NO: 590, SEQ ID NO: 591, SEQ ID NO: 592, SEQ ID NO: 593, SEQ ID NO: 594, SEQ ID NO: 595, SEQ ID NO: 596, SEQ ID NO: 597, SEQ ID NO: 606, SEQ ID NO: 621, SEQ ID NO: 659, or SEQ ID NO: 676, where the first antigen-binding domain does not comprise (i) a light chain variable domain of SEQ ID NO: 503 and a heavy chain variable domain of SEQ ID NO: 502; or (ii) a light chain variable domain of SEQ ID NO: 503 and heavy chain variable domain that is not one of SEQ ID NOs: 511, 513, 514, 516-523, 527, 529, 538, 540-543, 546, 547, 578-597, 606, 621, 659, and 676; or (iii) a heavy chain variable domain of SEQ ID NO: 502 and light chain variable domain that is not one of SEQ ID NOs: 550, 554, 556-560, 562, 565, 569, 570-576, 697-713, and 732.

[0029] In some embodiments of any of the ABPCs described herein, a composition including the ABPC provides for: an increase in toxin liberation in the target mammalian cell as compared to a composition including the same amount of a control ABPC; and/or an increase in target mammalian cell killing as compared to a composition including the same amount of a control ABPC.

[0030] In some embodiments of any of the ABPCs described herein, a composition including the ABPC provides for an increase in endolysosomal delivery in the target mammalian cell as compared to a composition including the same amount of a control ABPC.

[0031] In some embodiments of any of the ABPCs described herein, a composition including the ABPC: results in a less of a reduction in the level of MET presented on the surface of the target mammalian cell as compared to a composition including the same amount of a control ABPC; or does not result in a detectable reduction in the level of MET presented on the surface of the target mammalian cell.

[0032] In some embodiments of any of the ABPCs described herein, the target mammalian cell is a cancer cell. In some embodiments of any of the ABPCs described herein, the ABPC is cytotoxic or cytostatic to the target mammalian cell. In some embodiments of any of the ABPCs described herein, the ABPC is: cross-reactive with a non-human primate MET and human MET; or cross-reactive with a non-human primate MET, a human MET, and one or both of rat MET and a mouse MET.

[0033] In some embodiments of any of the ABPCs described herein, the ABPC includes a single polypeptide. In some embodiments of any of the ABPCs described herein, the antigen-binding domain is selected from the group consisting of: a VH domain, a VHH domain, a VNAR domain, and a scFv. In some embodiments of any of the ABPCs described herein, the ABPC includes two or more polypeptides. In some embodiments of any of the ABPCs described herein, the ABPC is an antibody.

[0034] In some embodiments of any of the ABPCs described herein, the half-life of the ABPC in vivo is decreased as compared to the half-life of a control ABPC in vivo.

[0035] In some embodiments of any of the ABPCs described herein, the ABPC includes a second antigen-binding domain.

[0036] Also provided herein are kits including at least one dose of the pharmaceutical composition of any one of the pharmaceutical compositions described herein or any one of the ABPCs described herein.

[0037] Also provided herein are methods of treating a cancer characterized by having a population of cancer cells that have MET or an epitope of MET presented on their surface, the method including: administering a therapeutically effective amount of any one of the pharmaceutical compositions described herein or any one of the ABPCs described herein to a subject identified as having a cancer characterized by having the population of cancer cells.

[0038] Also provided herein are methods of reducing the volume of a tumor in a subject, where the tumor is characterized by having a population of cancer cells that have MET or an epitope of MET presented on their surface, the method including: administering a therapeutically effective amount of any one of the pharmaceutical compositions described herein or any one of the ABPCs described herein to a subject identified as having a cancer characterized by having the population of cancer cells.

[0039] Also provided herein are methods of inducing cell death in a cancer cell in a subject, where the cancer cell has MET or an epitope of MET presented on its surface, where the method includes: administering a therapeutically effective amount of any one of the pharmaceutical compositions described herein or any one of the ABPCs described herein to a subject identified as having a cancer characterized by having a population of the cancer cells.

[0040] Also provided herein are methods of decreasing the risk of developing a metastasis or decreasing the risk of developing an additional metastasis in a subject having a cancer, where the cancer is characterized by having a population of cancer cells that have MET or an epitope of MET presented on their surface the method including: administering a therapeutically effective amount of any one of the pharmaceutical compositions described herein or any one of the ABPCs described herein to a subject identified as having a cancer characterized by having the population of cancer cells.

[0041] As used herein, the term “antigen-binding protein construct” is (i) a single polypeptide that includes at least one antigen-binding domain or (ii) a complex of two or more polypeptides (e.g., the same or different polypeptides) that together form at least one antigen-binding domain. Non-limiting examples and aspects of antigen-binding protein constructs are described herein. Additional examples and aspects of antigen-binding protein constructs are known in the art.

[0042] A “multi-specific antigen-binding protein construct” is an antigen-binding protein construct that includes two or more different antigen-binding domains that collectively specifically bind two or more different epitopes. The two or more different epitopes may be epitopes on the same antigen (e.g., a single polypeptide present on the surface of a cell) or on different antigens (e.g., different proteins present on the surface of the same cell or present on the surface of different cells). In some aspects, the antigen is present on the surface of the cell. In some aspects, a multi-specific antigen-binding protein construct binds two different epitopes (i.e., a “bispecific antigen-binding protein construct”). In some aspects, a multi-specific antigen-binding protein construct binds three different epitopes (i.e., a “trispecific antigen-binding protein construct”). In some aspects, a multi-specific antigen-binding protein construct binds four different epitopes (i.e., a “quadspecific antigen-binding protein construct”). In some aspects, a multi-specific antigen-binding protein construct binds five different epitopes (i.e., a “quintspecific antigen-binding protein construct”). Each binding specificity may be present in any suitable valency. Non-limiting examples of multi-specific antigen-binding protein constructs are described herein.

[0043] An “antigen-binding domain” is one or more protein domain(s) (e.g., formed from amino acids from a single polypeptide or formed from amino acids from two or more polypeptides (e.g., the same or different polypeptides) that is capable of specifically binding to one or more different antigen(s). In some examples, an antigen-binding domain can bind to an antigen or epitope with specificity and affinity similar to that of naturally-occurring antibodies. In some embodiments, the antigen-binding domain can be an antibody or a fragment thereof. In some embodiments, an antigen-binding domain can include an alternative scaffold. Non-limiting examples of antigen-binding domains are described herein. Additional examples of antigen-binding domains are known in the art. In some examples, an antigen-binding domain can bind to a single antigen.

[0044] The term “antibody” is used herein in its broadest sense and includes certain types of immunoglobulin molecules that include one or more antigen-binding domains that specifically bind to an antigen or epitope. An antibody specifically includes, e.g., intact antibodies (e.g., intact immunoglobulins, e.g., human IgG (e.g., human IgG1, human IgG2, human IgG3, human IgG4)), antibody fragments, and multi-specific antibodies. One example of an antigen-binding domain is an antigen-binding domain formed by a VH-VL dimer. Additional examples of an antibody are described herein. Additional examples of an antibody are known in the art.

[0045] The phrase “endosomal/lysosomal pathway” refers to a network of endosomes (early endosomes, multi-vesicular bodies, late endosomes, and lysosomes) in the cytoplasm of a mammalian cell, wherein molecules internalized through cell-mediated internalization processes, e.g., pinocytosis, micropinocytosis, receptor-mediated endocytosis, and/or phagocytosis, are sorted.

[0046] Once the endosomes in the endosomal/lysosomal pathway are purified or isolated, assays for a target protein (e.g., an antigen-binding protein construct described herein) can be performed using methods known in the art (ELISA, Western blot, immunofluorescence, and immunoprecipitation followed by an assay for protein concentration), and can be used to determine the concentration or relative level of the target protein in the endosomes. Alternatively, endosomes in the endosomal/lysosomal pathway can be imaged using immunofluorescence microscopy using an detectably-labelled antibody (e.g., a fluorophore-labelled, a dye-labelled, or a GFP-labelled antibody, e.g., CellLight™ Early Endosome-GFP) that specifically binds to a characteristic protein present in the endosomes (e.g., EEA1 for early endosomes) and a fluorophore-labelled antibody that specifically binds to the protein of interest (e.g., an antigen-binding protein construct), and the level of the target protein in the endosomes can be determined by quantitation of the overlap in the fluorescence emissions of the two different antibodies.

[0047] The phrase “endolysosomal delivery” refers to rate of accumulation over time or the total accumulation at a specific timepoint of an antigen-binding protein construct (e.g., any of the antigen-binding protein constructs described herein) in the endosomal/lysosomal pathway in a mammalian cell (e.g., any of the exemplary target mammalian cells described herein).

[0048] An exemplary method to calculate the increase in endolysosomal delivery of a pH engineered ABPC variant as compared to its corresponding starting ABPC from cellular fluorescence data is to measure the ratio of the variant's mean fluorescence intensity minus the mean fluorescence intensity of a non-binding IgG control, then all divided by the variant's corresponding starting ABPC's mean fluorescence intensity minus the mean fluorescence intensity of the IgG control.

[0049] An exemplary assay for measuring endolysosomal delivery of any of the ABPCs described herein include those which involve labeling of an ABPC with a fluorescent dye, followed by incubation of the labeled ABPC with cells and measurement of cellular fluorescence as an indicator of endolysosomal delivery of the ABPC (e.g., as described generally in Wustner, Traffic 7(6):699-715, 2006). Alternatively, pH-sensitive dyes which preferentially fluoresce at acidic pH but not neutral pH can be used to label any of the ABPCs described herein, which can then be incubated with cells and the cellular fluorescence measured as an indicator of delivery of the ABPC into acidic endolysosomal compartments.

[0050] The term “population” when used before a noun means two or more of the specific noun. For example, the phrase “a population of cancer cells” means “two or more cancer cells.” Non-limiting examples of cancer cells are described herein.

[0051] The phrase “cytostatic to a cell” refers to a direct or indirect decrease in the proliferation (cell division) of the cell (e.g., a cancer cell) in vivo or in vitro. When an agent is cytostatic to a cell, the agent can, e.g., directly or indirectly result in cell cycle arrest of the cell (e.g., a cancer cell). In some examples, an agent that is cytostatic to a cell can reduce the number of cells in a population of the cells that are in S phase (as compared to the number of cells in a population of the cells that are in S phase prior to contact with the agent). In some examples, an agent that is cytostatic to a cell can reduce the percentage of the cells in S phase by at least 20%, at least 40%, at least 60%, or at least 80% (e.g., as compared to the percentage of cells in a population of the cells that are in S phase prior to contact with the agent).

[0052] The phrase “cytotoxic to a cell” refers to the inducement, directly or indirectly, in the death (e.g., necrosis or apoptosis) of the cell (e.g., a mammalian cell, e.g., a cancer cell).

[0053] “Affinity” refers to the strength of the sum total of non-covalent interactions between an antigen-binding site and its binding partner (e.g., an antigen or epitope). Unless indicated otherwise, as used herein, “affinity” refers to intrinsic binding affinity, which reflects a 1:1 interaction between members of an antigen-binding domain and an antigen or epitope. The affinity of a molecule X for its partner Y can be represented by the dissociation equilibrium constant (K_{D}). Affinity can be measured by common methods known in the art, including those described herein. Affinity can be determined, for example, using surface plasmon resonance (SPR) technology (e.g., BIACORE®) or biolayer interferometry (e.g., FORTEBIO®). Additional methods for determining the affinity for an antigen-binding domain and its corresponding antigen or epitope are known in the art.

[0054] The term “epitope” means a portion of an antigen that is specifically bound by an antigen-binding domain through a set of physical interactions between: (i) all monomers (e.g. individual amino acid residues, sugar side chains, and post-translationally modified amino acid residues) on the portion of the antigen-binding domain that specifically binds the antigen and (ii) all monomers (e.g. individual amino acid residues, sugar side chains, post-translationally modified amino acid residues) on the portion of the antigen that is specifically bound by the antigen-binding domain. Epitopes can, e.g., consist of surface-accessible amino acid residues, sugar side chains, phosphorylated amino acid residues, methylated amino acid residues, and/or acetylated amino acid residues and may have specific three-dimensional structural characteristics, as well as specific charge characteristics. Conformational and non-conformational epitopes are distinguished in that binding to the former, but not the latter, may be lost in the presence of denaturing solvents. In some embodiments, an epitope is defined by a linear amino acid sequence of at least about 3 to 6 amino acids, or about 10 to 15 amino acids. In some embodiments, an epitope refers to a portion of a full-length protein or a portion thereof that is defined by a three-dimensional structure (e.g., protein folding). In some embodiments, an epitope is defined by a discontinuous amino acid sequence that is brought together via protein folding. In some embodiments, an epitope is defined by a discontinuous amino acid sequence that is brought together by quaternary structure (e.g., a cleft formed by the interaction of two different polypeptide chains). The amino acid sequences between the residues that define the epitope may not be critical to three-dimensional structure of the epitope. A conformational epitope may be determined and screened using assays that compare binding of antigen-binding protein construct to a denatured version of the antigen, such that a linear epitope is generated. An epitope may include amino acid residues that are directly involved in the binding, and other amino acid residues, which are not directly involved in the binding.

[0055] Methods for identifying an epitope to which an antigen-binding domain specifically binds are known in the art, e.g., structure-based analysis (e.g. X-ray crystallography, NMR, and/or electron microscopy) (e.g. on the antigen and/or the antigen-antigen binding domain complex) and/or mutagenesis-based analysis (e.g. alanine scanning mutagenesis, glycine scanning mutagenesis, and homology scanning mutagenesis) wherein mutants are measured in a binding assay with a binding partner, many of which are known in the art.

[0056] The term “paratope” means a portion of an antigen-binding domain that specifically binds to an antigen through a set of physical interactions between: (i) all monomers (e.g. individual amino acid residues, sugar side chains, posttranslationally modified amino acid residues) on the portion of the antigen-binding domain that specifically binds the antigen and (ii) all monomers (e.g. individual amino acid residues, sugar side chains, posttranslationally modified amino acid residues) on the portion of the antigen that is specifically bound by the antigen-binding domain. Paratopes can, e.g. consist of surface-accessible amino acid residues and may have specific three-dimensional structural characteristics, as well as specific charge characteristics. In some embodiments, a paratope refers to a portion of a full-length antigen-binding domain or a portion thereof that is defined by a three-dimensional structure (e.g., protein folding). In some embodiments, a paratope is defined by a discontinuous amino acid sequence that is brought together via protein folding. In some embodiments, an epitope is defined by a discontinuous amino acid sequence that is brought together by quaternary structure (e.g., a cleft formed by the interaction of two different polypeptide chains). The amino acid sequences between the residues that define the paratope may not be critical to three-dimensional structure of the paratope. A paratope may comprise amino acid residues that are directly involved in the binding, and other amino acid residues, which are not directly involved in the binding.

[0057] Methods for identifying a paratope to which an antigen-binding domain specifically binds are known in the art, e.g., structure-based analysis (e.g., X-ray crystallography, NMR, and/or electron microscopy) (e.g. on the antigen-binding domain, and/or the antigen binding domain-antigen complex), and/or mutagenesis-based analysis (e.g., alanine scanning mutagenesis, glycine scanning mutagenesis, and homology scanning mutagenesis) wherein mutants are measured in a binding assay with a binding partner, many of which are known in the art.

[0058] The phrase “present on the surface of a mammalian cell” means (1) an antigen that physically attached to or at least partially embedded in the plasma membrane of a mammalian cell (e.g., a transmembrane protein, a peripheral membrane protein, a lipid-anchored protein (e.g., a GPI-anchor), an N-myristolyated protein, or a S-palmitoylated protein) or (2) an antigen that is stably bound to its cognate receptor, where the cognate receptor is physically attached to the plasma membrane of a mammalian cell (e.g., a ligand bound to its cognate receptor, where the cognate receptor is physically attached to the plasma membrane). Non-limiting methods for determining the presence of antigen on the surface of a mammalian cell include fluorescence-activated cell sorting (FACS), immunohistochemistry, cell-fractionation assays and Western blotting.

[0059] The phrase “control ABPC” or “control antigen-binding protein construct” means (i) an ABPC that is capable of specifically binding to MET or an epitope of MET presented on the surface of a mammalian cell (e.g., a target mammalian cell), where one or both of the following is true: (a) the dissociation rate of the first antigen-binding domain at a pH of about 4.0 to about 6.5 (e.g., any of the subranges of this range described herein) is no more than 3-fold (e.g., no more than 2.8-fold, no more than 2.6-fold, no more than 2.5-fold, no more than 2.4-fold, no more than 2.2-fold, no more than 2.0-fold, no more than 1.8-fold, no more than 1.6-fold, no more than 1.5-fold, no more than 1.4-fold, no more than 1.2-fold, no more than 1.0-fold, no more than 0.8-fold, no more than 0.6-fold, no more than 0.5-fold, no more than 0.4-fold, no more than 0.3-fold no more than 0.2-fold, or no more than 0.1-fold) faster than the dissociation rate at a pH of about 7.0 to about 8.0 (e.g., any of the subranges of this range described herein); or (b) the dissociation constant (K_{D}) of the first antigen-binding domain at a pH of about 4.0 to about 6.5 (e.g., any of the subranges of this range described herein) is no more than 3-fold (e.g., no more than 2.8-fold, no more than 2.6-fold, no more than 2.5-fold, no more than 2.4-fold, no more than 2.2-fold, no more than 2.0-fold, no more than 1.8-fold, no more than 1.6-fold, no more than 1.5-fold, no more than 1.4-fold, no more than 1.2-fold, no more than 1.0-fold, no more than 0.8-fold, no more than 0.6-fold, no more than 0.5-fold, no more than 0.4-fold, no more than 0.3-fold no more than 0.2-fold, or no more than 0.1-fold) greater than the K_{D} at a pH of about 7.0 to about 8.0 (e.g., any of the subranges of this range described herein); and/or (ii) Telisotuzumab; and/or (iii) Emibetuzumab; and/or (iv) hucMET27Gv1.3; and/or (v) P3D12 (Tanabe).

[0060] The term “extracellular space” means the liquid exterior to the plasma membrane of a mammalian cell. When a mammalian cell is in vitro, the extracellular space can be a liquid culture medium. When a mammalian cell is in vivo, the extracellular space can be, e.g., plasma, serum, blood, interstitial fluid, or lymph.

[0061] The term “endolysosomal space” means the fluid encapsulated by the vesicles and organelles that make-up the endosomal/lysosomal pathway in a mammalian cell.

[0062] The phrase “a reduced level” or “a decreased level” can be a reduction or decrease of at least a 1% (e.g., at least 2%, at least 4%, at least 6%, at least 8%, at least 10%, at least 12%, at least 14%, at least 16%, at least 18%, at least 20%, at least 22%, at least 24%, at least 26%, at least 30%, at least 35%, at least 40%, at least 45%, at least 50%, at least 55%, at least 60%, at least 65%, at least 70%, at least 75%, at least 80%, at least 85%, at least 90%, at least 95%, or at least 99%) reduction as compared to a reference level or value.

[0063] The term “cell killing potency” refers to the ability of an agent (e.g., any of the ABPCs described herein) to induce, directly or indirectly, the apoptosis and/or necrosis of a mammalian cell (e.g., a cancer cell), measured as a rate over time or at a relevant timepoint. Methods for determining the cell killing potency of a cell are known in the art (e.g., trypan blue staining, microscopy, fluorescence-assisted cell sorting, and assays to detect markers of apoptosis (e.g., Annexin V)). In non-limiting examples, cell killing potency can be measured, e.g., by cell killing at a single concentration of an agent, by the IC50 of the agent (i.e. the concentration of the agent whereby half the maximal cell killing potency is achieved), or by the ratio of an agent's dissociation constant KD on mammalian cells divided by its IC50. In some non-limiting examples, the IC50s and/or the KD ratios described herein are compared to those of a control ABPC (as defined herein), and, optionally, demonstrate that the ABPCs described herein have a higher cell killing potency as compared to the control ABPC.

[0064] The term “toxin liberation” refers to the ability of a mammalian cell (e.g., a non-cancerous mammalian cell or a cancer cell) to internalize (e.g., via pinocytosis and/or receptor-mediated endocytosis) any of the ABPCs described herein (e.g., any of ABPCs or control ABPCs described herein) that are conjugated to a toxin, and subsequently release the toxin conjugated to the ABPC, measured as a rate over time or at a specific timepoint. Toxin liberation can be assessed using a variety of different exemplary assays, e.g., ELISA, immunofluorescence, cell killing assays, cell cycle arrest assays, DNA damage assays, mass spectrometry, HPLC, and/or an isotope-labeled toxin.

[0065] The phrase “target cell” or “target mammalian cell” or “mammalian target cell” means a mammalian cell that has at least one MET present on its surface. In some examples, a mammalian target cell can be a cancer cell. In some embodiments of a target mammalian cell can have a total of about 1 to about 10,000,000, about 1 to about 9,000,000, about 1 to about 8,000,000, about 1 to about 7,000,000, about 1 to about 6,000,000, about 1 to about 5,000,000, about 1 to about 4,000,000, about 1 to about 3,000,000, about 1 to about 2,000,000, about 1 to about 1,000,000, about 1 to about 800,000, about 1 to about 600,000, about 1 to about 400,000, about 1 to about 200,000, about 1 to about 100,000, about 1 to about 80,000, about 1 to about 80,000, about 1 to about 75,000, about 1 to about 70,000, about 1 to about 65,000, about 1 to about 60,000, about 1 to about 55,000, about 1 to about 50,000, about 1 to about 45,000, about 1 to about 40,000, about 1 to about 35,000, about 1 to about 30,000, about 1 to about 25,000, about 1 to about 20,000, about 1 to about 15,000, about 1 to about 10,000, about 1 to about 7,500, about 1 to about 5,000, about 1 to about 4,000, about 1 to about 3,000, about 1 to about 2,000, about 1 to about 1,000, about 1 to about 500, about 1 to about 100, about 1 to about 50, about 1 to about 10, about 10 to about 10,000,000, about 10 to about 9,000,000, about 10 to about 8,000,000, about 10 to about 7,000,000, about 10 to about 6,000,000, about 10 to about 5,000,000, about 10 to about 4,000,000, about 10 to about 3,000,000, about 10 to about 2,000,000, about 10 to about 1,000,000, about 10 to about 800,000, about 10 to about 600,000, about 10 to about 400,000, about 10 to about 200,000, about 10 to about 100,000, about 10 to about 80,000, about 10 to about 80,000, about 10 to about 75,000, about 10 to about 70,000, about 10 to about 65,000, about 10 to about 60,000, about 10 to about 55,000, about 10 to about 50,000, about 10 to about 45,000, about 10 to about 40,000, about 10 to about 35,000, about 10 to about 30,000, about 10 to about 25,000, about 10 to about 20,000, about 10 to about 15,000, about 10 to about 10,000, about 10 to about 7,500, about 10 to about 5,000, about 10 to about 4,000, about 10 to about 3,000, about 10 to about 2,000, about 10 to about 1,000, about 10 to about 500, about 10 to about 100, about 10 to about 50, about 50 to about 10,000,000, about 50 to about 9,000,000, about 50 to about 8,000,000, about 50 to about 7,000,000, about 50 to about 6,000,000, about 50 to about 5,000,000, about 50 to about 4,000,000, about 50 to about 3,000,000, about 50 to about 2,000,000, about 50 to about 1,000,000, about 50 to about 800,000, about 50 to about 600,000, about 50 to about 400,000, about 50 to about 200,000, about 50 to about 100,000, about 50 to about 80,000, about 50 to about 80,000, about 50 to about 75,000, about 50 to about 70,000, about 50 to about 65,000, about 50 to about 60,000, about 50 to about 55,000, about 50 to about 50,000, about 50 to about 45,000, about 50 to about 40,000, about 50 to about 35,000, about 50 to about 30,000, about 50 to about 25,000, about 50 to about 20,000, about 50 to about 15,000, about 50 to about 10,000, about 50 to about 7,500, about 50 to about 5,000, about 50 to about 4,000, about 50 to about 3,000, about 50 to about 2,000, about 50 to about 1,000, about 50 to about 500, about 50 to about 100, about 100 to about 10,000,000, about 100 to about 9,000,000, about 100 to about 8,000,000, about 100 to about 7,000,000, about 100 to about 6,000,000, about 100 to about 5,000,000, about 100 to about 4,000,000, about 100 to about 3,000,000, about 100 to about 2,000,000, about 100 to about 1,000,000, about 100 to about 800,000, about 100 to about 600,000, about 100 to about 400,000, about 100 to about 200,000, about 100 to about 100,000, about 100 to about 80,000, about 100 to about 75,000, about 100 to about 70,000, about 100 to about 65,000, about 100 to about 60,000, about 100 to about 55,000, about 100 to about 50,000, about 100 to about 45,000, about 100 to about 40,000, about 100 to about 35,000, about 100 to about 30,000, about 100 to about 25,000, about 100 to about 20,000, about 100 to about 15,000, about 100 to about 10,000, about 100 to about 7,500, about 100 to about 5,000, about 100 to about 4,000, about 100 to about 3,000, about 100 to about 2,000, about 100 to about 1,000, about 100 to about 500, about 500 to about 10,000,000, about 500 to about 9,000,000, about 500 to about 8,000,000, about 500 to about 7,000,000, about 500 to about 6,000,000, about 500 to about 5,000,000, about 500 to about 4,000,000, about 500 to about 3,000,000, about 500 to about 2,000,000, about 500 to about 1,000,000, about 500 to about 800,000, about 500 to about 600,000, about 500 to about 400,000, about 500 to about 200,000, about 500 to about 100,000, about 500 to about 80,000, about 500 to about 75,000, about 500 to about 70,000, about 500 to about 65,000, about 500 to about 60,000, about 500 to about 55,000, about 500 to about 50,000, about 500 to about 45,000, about 500 to about 40,000, about 500 to about 35,000, about 500 to about 30,000, about 500 to about 25,000, about 500 to about 20,000, about 500 to about 15,000, about 500 to about 10,000, about 500 to about 7,500, about 500 to about 5,000, about 500 to about 4,000, about 500 to about 3,000, about 500 to about 2,000, about 500 to about 1,000, about 1,000 to about 10,000,000, about 1,000 to about 9,000,000, about 1,000 to about 8,000,000, about 1,000 to about 7,000,000, about 1,000 to about 6,000,000, about 1,000 to about 5,000,000, about 1,000 to about 4,000,000, about 1,000 to about 3,000,000, about 1,000 to about 2,000,000, about 1,000 to about 1,000,000, about 1,000 to about 800,000, about 1,000 to about 600,000, about 1,000 to about 400,000, about 1,000 to about 200,000, about 1,000 to about 100,000, about 1,000 to about 80,000, about 1,000 to about 75,000, about 1,000 to about 70,000, about 1,000 to about 65,000, about 1,000 to about 60,000, about 1,000 to about 55,000, about 1,000 to about 50,000, about 1,000 to about 45,000, about 1,000 to about 40,000, about 1,000 to about 35,000, about 1,000 to about 30,000, about 1,000 to about 25,000, about 1,000 to about 20,000, about 1,000 to about 15,000, about 1,000 to about 10,000, about 1,000 to about 7,500, about 1,000 to about 5,000, about 1,000 to about 4,000, about 1,000 to about 3,000, about 1,000 to about 2,000, about 2,000 to about 10,000,000, about 2,000 to about 9,000,000, about 2,000 to about 8,000,000, about 2,000 to about 7,000,000, about 2,000 to about 6,000,000, about 2,000 to about 5,000,000, about 2,000 to about 4,000,000, about 2,000 to about 3,000,000, about 2,000 to about 2,000,000, about 2,000 to about 1,000,000, about 2,000 to about 800,000, about 2,000 to about 600,000, about 2,000 to about 400,000, about 2,000 to about 200,000, about 2,000 to about 100,000, about 2,000 to about 80,000, about 2,000 to about 75,000, about 2,000 to about 70,000, about 2,000 to about 65,000, about 2,000 to about 60,000, about 2,000 to about 55,000, about 2,000 to about 50,000, about 2,000 to about 45,000, about 2,000 to about 40,000, about 2,000 to about 35,000, about 2,000 to about 30,000, about 2,000 to about 25,000, about 2,000 to about 20,000, about 2,000 to about 15,000, about 2,000 to about 10,000, about 2,000 to about 7,500, about 2,000 to about 5,000, about 2,000 to about 4,000, about 2,000 to about 3,000, about 3,000 to about 10,000,000, about 3,000 to about 9,000,000, about 3,000 to about 8,000,000, about 3,000 to about 7,000,000, about 3,000 to about 6,000,000, about 3,000 to about 5,000,000, about 3,000 to about 4,000,000, about 3,000 to about 3,000,000, about 3,000 to about 2,000,000, about 3,000 to about 1,000,000, about 3,000 to about 800,000, about 3,000 to about 600,000, about 3,000 to about 400,000, about 3,000 to about 200,000, about 3,000 to about 100,000, about 3,000 to about 80,000, about 3,000 to about 75,000, about 3,000 to about 70,000, about 3,000 to about 65,000, about 3,000 to about 60,000, about 3,000 to about 55,000, about 3,000 to about 50,000, about 3,000 to about 45,000, about 3,000 to about 40,000, about 3,000 to about 35,000, about 3,000 to about 30,000, about 3,000 to about 25,000, about 3,000 to about 20,000, about 3,000 to about 15,000, about 3,000 to about 10,000, about 3,000 to about 7,500, about 3,000 to about 5,000, about 3,000 to about 4,000, about 4,000 to about 10,000,000, about 4,000 to about 9,000,000, about 4,000 to about 8,000,000, about 4,000 to about 7,000,000, about 4,000 to about 6,000,000, about 4,000 to about 5,000,000, about 4,000 to about 4,000,000, about 4,000 to about 3,000,000, about 4,000 to about 2,000,000, about 4,000 to about 1,000,000, about 4,000 to about 800,000, about 4,000 to about 600,000, about 4,000 to about 400,000, about 4,000 to about 200,000, about 4,000 to about 100,000, about 4,000 to about 80,000, about 4,000 to about 75,000, about 4,000 to about 70,000, about 4,000 to about 65,000, about 4,000 to about 60,000, about 4,000 to about 55,000, about 4,000 to about 50,000, about 4,000 to about 45,000, about 4,000 to about 40,000, about 4,000 to about 35,000, about 4,000 to about 30,000, about 4,000 to about 25,000, about 4,000 to about 20,000, about 4,000 to about 15,000, about 4,000 to about 10,000, about 4,000 to about 7,500, about 4,000 to about 5,000, about 5,000 to about 10,000,000, about 5,000 to about 9,000,000, about 5,000 to about 8,000,000, about 5,000 to about 7,000,000, about 5,000 to about 6,000,000, about 5,000 to about 5,000,000, about 5,000 to about 4,000,000, about 5,000 to about 3,000,000, about 5,000 to about 2,000,000, about 5,000 to about 1,000,000, about 5,000 to about 800,000, about 5,000 to about 600,000, about 5,000 to about 400,000, about 5,000 to about 200,000, about 5,000 to about 100,000, about 5,000 to about 80,000, about 5,000 to about 75,000, about 5,000 to about 70,000, about 5,000 to about 65,000, about 5,000 to about 60,000, about 5,000 to about 55,000, about 5,000 to about 50,000, about 5,000 to about 45,000, about 5,000 to about 40,000, about 5,000 to about 35,000, about 5,000 to about 30,000, about 5,000 to about 25,000, about 5,000 to about 20,000, about 5,000 to about 15,000, about 5,000 to about 10,000, about 5,000 to about 7,500, about 7,500 to about 10,000,000, about 7,500 to about 9,000,000, about 7,500 to about 8,000,000, about 7,500 to about 7,000,000, about 7,500 to about 6,000,000, about 7,500 to about 5,000,000, about 7,500 to about 4,000,000, about 7,500 to about 3,000,000, about 7,500 to about 2,000,000, about 7,500 to about 1,000,000, about 7,500 to about 800,000, about 7,500 to about 600,000, about 7,500 to about 400,000, about 7,500 to about 200,000, about 7,500 to about 100,000, about 7,500 to about 80,000, about 7,500 to about 75,000, about 7,500 to about 70,000, about 7,500 to about 65,000, about 7,500 to about 60,000, about 7,500 to about 55,000, about 7,500 to about 50,000, about 7,500 to about 45,000, about 7,500 to about 40,000, about 7,500 to about 35,000, about 7,500 to about 30,000, about 7,500 to about 25,000, about 7,500 to about 20,000, about 7,500 to about 15,000, about 7,500 to about 10,000, about 10,000 to about 10,000,000, about 10,000 to about 9,000,000, about 10,000 to about 8,000,000, about 10,000 to about 7,000,000, about 10,000 to about 6,000,000, about 10,000 to about 5,000,000, about 10,000 to about 4,000,000, about 10,000 to about 3,000,000, about 10,000 to about 2,000,000, about 10,000 to about 1,000,000, about 10,000 to about 800,000, about 10,000 to about 600,000, about 10,000 to about 400,000, about 10,000 to about 200,000, about 10,000 to about 100,000, about 10,000 to about 80,000, about 10,000 to about 75,000, about 10,000 to about 70,000, about 10,000 to about 65,000, about 10,000 to about 60,000, about 10,000 to about 55,000, about 10,000 to about 50,000, about 10,000 to about 45,000, about 10,000 to about 40,000, about 10,000 to about 35,000, about 10,000 to about 30,000, about 10,000 to about 25,000, about 10,000 to about 20,000, about 10,000 to about 15,000, about 15,000 to about 10,000,000, about 15,000 to about 9,000,000, about 15,000 to about 8,000,000, about 15,000 to about 7,000,000, about 15,000 to about 6,000,000, about 15,000 to about 5,000,000, about 15,000 to about 4,000,000, about 15,000 to about 3,000,000, about 15,000 to about 2,000,000, about 15,000 to about 1,000,000, about 15,000 to about 800,000, about 15,000 to about 600,000, about 15,000 to about 400,000, about 15,000 to about 200,000, about 15,000 to about 100,000, about 15,000 to about 80,000, about 15,000 to about 75,000, about 15,000 to about 70,000, about 15,000 to about 65,000, about 15,000 to about 60,000, about 15,000 to about 55,000, about 15,000 to about 50,000, about 15,000 to about 45,000, about 15,000 to about 40,000, about 15,000 to about 35,000, about 15,000 to about 30,000, about 15,000 to about 25,000, about 15,000 to about 20,000, about 20,000 to about 10,000,000, about 20,000 to about 9,000,000, about 20,000 to about 8,000,000, about 20,000 to about 7,000,000, about 20,000 to about 6,000,000, about 20,000 to about 5,000,000, about 20,000 to about 4,000,000, about 20,000 to about 3,000,000, about 20,000 to about 2,000,000, about 20,000 to about 1,000,000, about 20,000 to about 800,000, about 20,000 to about 600,000, about 20,000 to about 400,000, about 20,000 to about 200,000, about 20,000 to about 100,000, about 20,000 to about 80,000, about 20,000 to about 75,000, about 20,000 to about 70,000, about 20,000 to about 65,000, about 210,000 to about 60,000, about 20,000 to about 55,000, about 20,000 to about 50,000, about 20,000 to about 45,000, about 20,000 to about 40,000, about 20,000 to about 35,000, about 20,000 to about 30,000, about 20,000 to about 25,000, about 25,000 to about 10,000,000, about 25,000 to about 9,000,000, about 25,000 to about 8,000,000, about 25,000 to about 7,000,000, about 25,000 to about 6,000,000, about 25,000 to about 5,000,000, about 25,000 to about 4,000,000, about 25,000 to about 3,000,000, about 25,000 to about 2,000,000, about 25,000 to about 1,000,000, about 25,000 to about 800,000, about 25,000 to about 600,000, about 25,000 to about 400,000, about 25,000 to about 200,000, about 25,000 to about 100,000, about 25,000 to about 80,000, about 25,000 to about 75,000, about 25,000 to about 70,000, about 25,000 to about 65,000, about 25,000 to about 60,000, about 25,000 to about 55,000, about 25,000 to about 50,000, about 25,000 to about 45,000, about 25,000 to about 40,000, about 25,000 to about 35,000, about 25,000 to about 30,000, about 30,000 to about 10,000,000, about 30,000 to about 9,000,000, about 30,000 to about 8,000,000, about 30,000 to about 7,000,000, about 30,000 to about 6,000,000, about 30,000 to about 5,000,000, about 30,000 to about 4,000,000, about 30,000 to about 3,000,000, about 30,000 to about 2,000,000, about 30,000 to about 1,000,000, about 30,000 to about 800,000, about 30,000 to about 600,000, about 30,000 to about 400,000, about 30,000 to about 200,000, about 30,000 to about 100,000, about 30,000 to about 80,000, about 30,000 to about 75,000, about 30,000 to about 70,000, about 30,000 to about 65,000, about 30,000 to about 60,000, about 30,000 to about 55,000, about 30,000 to about 50,000, about 30,000 to about 45,000, about 30,000 to about 40,000, about 30,000 to about 35,000, about 35,000 to about 10,000,000, about 35,000 to about 9,000,000, about 35,000 to about 8,000,000, about 35,000 to about 7,000,000, about 35,000 to about 6,000,000, about 35,000 to about 5,000,000, about 35,000 to about 4,000,000, about 35,000 to about 3,000,000, about 35,000 to about 2,000,000, about 35,000 to about 1,000,000, about 35,000 to about 800,000, about 35,000 to about 600,000, about 35,000 to about 400,000, about 35,000 to about 200,000, about 35,000 to about 100,000, about 35,000 to about 80,000, about 35,000 to about 75,000, about 35,000 to about 70,000, about 35,000 to about 65,000, about 35,000 to about 60,000, about 35,000 to about 55,000, about 35,000 to about 50,000, about 35,000 to about 45,000, about 35,000 to about 40,000, about 40,000 to about 10,000,000, about 40,000 to about 9,000,000, about 40,000 to about 8,000,000, about 40,000 to about 7,000,000, about 40,000 to about 6,000,000, about 40,000 to about 5,000,000, about 40,000 to about 4,000,000, about 40,000 to about 3,000,000, about 40,000 to about 2,000,000, about 40,000 to about 1,000,000, about 40,000 to about 800,000, about 40,000 to about 600,000, about 40,000 to about 400,000, about 40,000 to about 200,000, about 40,000 to about 100,000, about 40,000 to about 80,000, about 40,000 to about 75,000, about 40,000 to about 70,000, about 40,000 to about 65,000, about 40,000 to about 60,000, about 40,000 to about 55,000, about 40,000 to about 50,000, about 40,000 to about 45,000, about 45,000 to about 10,000,000, about 45,000 to about 9,000,000, about 45,000 to about 8,000,000, about 45,000 to about 7,000,000, about 45,000 to about 6,000,000, about 45,000 to about 5,000,000, about 45,000 to about 4,000,000, about 45,000 to about 3,000,000, about 45,000 to about 2,000,000, about 45,000 to about 1,000,000, about 45,000 to about 800,000, about 45,000 to about 600,000, about 45,000 to about 400,000, about 45,000 to about 200,000, about 45,000 to about 100,000, about 45,000 to about 80,000, about 45,000 to about 75,000, about 45,000 to about 70,000, about 45,000 to about 65,000, about 45,000 to about 60,000, about 45,000 to about 55,000, about 45,000 to about 50,000, about 50,000 to about 10,000,000, about 50,000 to about 9,000,000, about 50,000 to about 8,000,000, about 50,000 to about 7,000,000, about 50,000 to about 6,000,000, about 50,000 to about 5,000,000, about 50,000 to about 4,000,000, about 50,000 to about 3,000,000, about 50,000 to about 2,000,000, about 50,000 to about 1,000,000, about 50,000 to about 800,000, about 50,000 to about 600,000, about 50,000 to about 400,000, about 50,000 to about 200,000, about 50,000 to about 100,000, about 50,000 to about 80,000, about 50,000 to about 75,000, about 50,000 to about 70,000, about 50,000 to about 65,000, about 50,000 to about 60,000, about 50,000 to about 55,000, about 55,000 to about 10,000,000, about 55,000 to about 9,000,000, about 55,000 to about 8,000,000, about 55,000 to about 7,000,000, about 55,000 to about 6,000,000, about 55,000 to about 5,000,000, about 55,000 to about 4,000,000, about 55,000 to about 3,000,000, about 55,000 to about 2,000,000, about 55,000 to about 1,000,000, about 55,000 to about 800,000, about 55,000 to about 600,000, about 55,000 to about 400,000, about 55,000 to about 200,000, about 55,000 to about 100,000, about 55,000 to about 80,000, about 55,000 to about 75,000, about 55,000 to about 70,000, about 55,000 to about 65,000, about 55,000 to about 60,000, about 60,000 to about 10,000,000, about 60,000 to about 9,000,000, about 60,000 to about 8,000,000, about 60,000 to about 7,000,000, about 60,000 to about 6,000,000, about 60,000 to about 5,000,000, about 60,000 to about 4,000,000, about 60,000 to about 3,000,000, about 60,000 to about 2,000,000, about 60,000 to about 1,000,000, about 60,000 to about 800,000, about 60,000 to about 600,000, about 60,000 to about 400,000, about 60,000 to about 200,000, about 60,000 to about 100,000, about 60,000 to about 80,000, about 60,000 to about 75,000, about 60,000 to about 70,000, about 60,000 to about 65,000, about 65,000 to about 10,000,000, about 65,000 to about 9,000,000, about 65,000 to about 8,000,000, about 65,000 to about 7,000,000, about 65,000 to about 6,000,000, about 65,000 to about 5,000,000, about 65,000 to about 4,000,000, about 65,000 to about 3,000,000, about 65,000 to about 2,000,000, about 65,000 to about 1,000,000, about 65,000 to about 800,000, about 65,000 to about 600,000, about 65,000 to about 400,000, about 65,000 to about 200,000, about 65,000 to about 100,000, about 65,000 to about 80,000, about 65,000 to about 75,000, about 65,000 to about 70,000, about 70,000 to about 10,000,000, about 70,000 to about 9,000,000, about 70,000 to about 8,000,000, about 70,000 to about 7,000,000, about 70,000 to about 6,000,000, about 70,000 to about 5,000,000, about 70,000 to about 4,000,000, about 70,000 to about 3,000,000, about 70,000 to about 2,000,000, about 70,000 to about 1,000,000, about 70,000 to about 800,000, about 70,000 to about 600,000, about 70,000 to about 400,000, about 70,000 to about 200,000, about 70,000 to about 100,000, about 70,000 to about 90,000, about 70,000 to about 80,000, about 80,000 to about 10,000,000, about 80,000 to about 9,000,000, about 80,000 to about 8,000,000, about 80,000 to about 7,000,000, about 80,000 to about 6,000,000, about 80,000 to about 5,000,000, about 80,000 to about 4,000,000, about 80,000 to about 3,000,000, about 80,000 to about 2,000,000, about 80,000 to about 1,000,000, about 80,000 to about 800,000, about 80,000 to about 600,000, about 80,000 to about 400,000, about 80,000 to about 200,000, about 80,000 to about 100,000, about 80,000 to about 90,000, about 90,000 to about 10,000,000, about 90,000 to about 9,000,000, about 90,000 to about 8,000,000, about 90,000 to about 7,000,000, about 90,000 to about 6,000,000, about 90,000 to about 5,000,000, about 90,000 to about 4,000,000, about 90,000 to about 3,000,000, about 90,000 to about 2,000,000, about 90,000 to about 1,000,000, about 90,000 to about 800,000, about 90,000 to about 600,000, about 90,000 to about 400,000, about 90,000 to about 200,000, about 90,000 to about 100,000, about 100,000 to about 10,000,000, about 100,000 to about 9,000,000, about 100,000 to about 8,000,000, about 100,000 to about 7,000,000, about 100,000 to about 6,000,000, about 100,000 to about 5,000,000, about 100,000 to about 4,000,000, about 100,000 to about 3,000,000, about 100,000 to about 2,000,000, about 100,000 to about 1,000,000, about 100,000 to about 800,000, about 100,000 to about 600,000, about 100,000 to about 400,000, about 100,000 to about 200,000, about 200,000 to about 10,000,000, about 200,000 to about 9,000,000, about 200,000 to about 8,000,000, about 200,000 to about 7,000,000, about 200,000 to about 6,000,000, about 200,000 to about 5,000,000, about 200,000 to about 4,000,000, about 200,000 to about 3,000,000, about 200,000 to about 2,000,000, about 200,000 to about 1,000,000, about 200,000 to about 800,000, about 200,000 to about 600,000, about 200,000 to about 400,000, about 400,000 to about 10,000,000, about 400,000 to about 9,000,000, about 400,000 to about 8,000,000, about 400,000 to about 7,000,000, about 400,000 to about 6,000,000, about 400,000 to about 5,000,000, about 400,000 to about 4,000,000, about 400,000 to about 3,000,000, about 400,000 to about 2,000,000, about 400,000 to about 1,000,000, about 400,000 to about 800,000, about 400,000 to about 600,000, about 600,000 to about 10,000,000, about 600,000 to about 9,000,000, about 600,000 to about 8,000,000, about 600,000 to about 7,000,000, about 600,000 to about 6,000,000, about 600,000 to about 5,000,000, about 600,000 to about 4,000,000, about 600,000 to about 3,000,000, about 600,000 to about 2,000,000, about 600,000 to about 1,000,000, about 600,000 to about 800,000, about 800,000 to about 10,000,000, about 800,000 to about 9,000,000, about 800,000 to about 8,000,000, about 800,000 to about 7,000,000, about 800,000 to about 6,000,000, about 800,000 to about 5,000,000, about 800,000 to about 4,000,000, about 800,000 to about 3,000,000, about 800,000 to about 2,000,000, about 800,000 to about 1,000,000, about 1,000,000 to about 10,000,000, about 1,000,000 to about 9,000,000, about 1,000,000 to about 8,000,000, about 1,000,000 to about 7,000,000, about 1,000,000 to about 6,000,000, about 1,000,000 to about 5,000,000, about 1,000,000 to about 4,000,000, about 1,000,000 to about 3,000,000, about 1,000,000 to about 2,000,000, about 2,000,000 to about 10,000,000, about 2,000,000 to about 9,000,000, about 2,000,000 to about 8,000,000, about 2,000,000 to about 7,000,000, about 2,000,000 to about 6,000,000, about 2,000,000 to about 5,000,000, about 2,000,000 to about 4,000,000, about 2,000,000 to about 3,000,000, about 3,000,000 to about 10,000,000, about 3,000,000 to about 9,000,000, about 3,000,000 to about 8,000,000, about 3,000,000 to about 7,000,000, about 3,000,000 to about 6,000,000, about 3,000,000 to about 5,000,000, about 3,000,000 to about 4,000,000, about 4,000,000 to about 10,000,000, about 4,000,000 to about 9,000,000, about 4,000,000 to about 8,000,000, about 4,000,000 to about 7,000,000, about 4,000,000 to about 6,000,000, about 4,000,000 to about 5,000,000, about 5,000,000 to about 10,000,000, about 5,000,000 to about 9,000,000, about 5,000,000 to about 8,000,000, about 5,000,000 to about 7,000,000, about 5,000,000 to about 6,000,000, about 6,000,000 to about 10,000,000, about 6,000,000 to about 9,000,000, about 6,000,000 to about 8,000,000, about 6,000,000 to about 7,000,000, about 7,000,000 to about 10,000,000, about 7,000,000 to about 9,000,000, about 7,000,000 to about 8,000,000, about 8,000,000 to about 10,000,000, about 8,000,000 to about 9,000,000, or about 9,000,000 to about 10,000,000 of the MET on present on the plasma membrane of the target mammalian cell.

[0066] The phrase “antigen density” means the number of MET present on the surface of a target mammalian cell or the average number of MET on the surface of a population of particular type of target mammalian cells. It can be measured, e.g., using the Quantibright bead kit or radiolabel (e.g., BD Biosciences PE Phycoerythrin Fluorescence Quantitation Kit, catalog #340495).

[0067] The phrase “amino acid substituted with a histidine” means the substitution of an amino acid residue that is not histidine in a reference polypeptide sequence with a histidine. Non-limiting methods for substituting an amino acid residue in a reference polypeptide with a histidine are described herein. Additional methods for substituting an amino acid residue in a reference polypeptide with a histidine are known in the art.

[0068] The phrase “amino acid substituted with an alanine” means the substitution of an amino acid residue that is a histidine in a reference polypeptide sequence with an alanine. Non-limiting methods for substituting a histidine in a reference polypeptide with an alanine are described herein. Additional methods for substituting an histidine in a reference polypeptide with an alanine are known in the art.

[0069] Unless otherwise defined, all technical and scientific terms used herein have the same meaning as commonly understood by one of ordinary skill in the art to which this invention belongs. Methods and materials are described herein for use in the present invention; other, suitable methods and materials known in the art can also be used. The materials, methods, and examples are illustrative only and not intended to be limiting. All publications, patent applications, patents, sequences, database entries, and other references mentioned herein are incorporated by reference in their entirety. In case of conflict, the present specification, including definitions, will control.

[0070] Other features and advantages of the invention will be apparent from the following detailed description and figures, and from the claims.

### BRIEF DESCRIPTION OF DRAWINGS

[0071] FIG. 1: SDS PAGE for TELISOTUZUMAB histidine scanning and alanine scanning. Expi293 cell culture supernatants post-harvest were loaded on non-reduced SDS PAGE gels to confirm expression of TELISOTUZUMAB and histidine scanning and alanine scanning variants. Arrows show the corresponding size for an IgG on a non-reduced SDS PAGE gel. MYT0886 is TELISOTUZUMAB and the rest of the lanes (MYT0887-MYT0924) are TELISOTUZUMAB heavy chain histidine scanning and alanine scanning variants.

[0072] FIGS. 2a to 2am: Binding of TELISOTUZUMAB starting ABPC and histidine scanning and alanine scanning variants to MET by biolayer interferometry. MYT0886 (TELISOTUZUMAB) and MYT0887-MYT0924, heavy chain histidine scanning and alanine scanning variants, were captured on anti-human Fc biosensors and associated with MET at low pH or high pH, as specified in the figures.

[0073] FIG. 3: SDS PAGE for TELISOTUZUMAB histidine scanning and alanine scanning. Expi293 cell culture supernatants post-harvest were loaded on non-reduced SDS PAGE gels to confirm expression of TELISOTUZUMAB and histidine scanning and alanine scanning variants. Arrows show the corresponding size for an IgG on a non-reduced SDS PAGE gel. MYT0886 is TELISOTUZUMAB and the rest of the lanes (MYT2028-MYT2058) are TELISOTUZUMAB light chain histidine scanning and alanine scanning variants.

[0074] FIGS. 4a to 4af: Binding of TELISOTUZUMAB starting ABPC and histidine scanning and alanine scanning variants to MET by biolayer interferometry. MYT0886 (TELISOTUZUMAB) and MYT2028-MYT2058, light chain histidine scanning and alanine scanning variants, were captured on anti-human Fc biosensors and associated with MET at low pH or high pH, as specified in the figures.

[0075] FIG. 5: SDS PAGE for TELISOTUZUMAB histidine scanning and alanine scanning. Expi293 cell culture supernatants post-harvest were loaded on non-reduced SDS PAGE gels to confirm expression of TELISOTUZUMAB histidine scanning and alanine scanning variants. Arrows show the corresponding size for an IgG on a non-reduced SDS PAGE gel. MYT2018-MYT2027 are TELISOTUZUMAB heavy chain combinations histidine scanning and alanine scanning variants.

[0076] FIGS. 6a to 6j: Binding of histidine scanning and alanine scanning variants of TELISOTUZUMAB to MET by biolayer interferometry. MYT2018-MYT2027, heavy chain combination histidine scanning and alanine scanning variants, were captured on anti-human Fc biosensors and associated with MET at low pH or high pH, as specified in the figures.

[0077] FIG. 7: SDS PAGE for TELISOTUZUMAB histidine scanning and alanine scanning. Expi293 cell culture supernatants post-harvest were loaded on non-reduced SDS PAGE gels to confirm expression of TELISOTUZUMAB histidine scanning and alanine scanning variants. Arrows show the corresponding size for an IgG on a non-reduced SDS PAGE gel. MYT4201-MYT4210 are TELISOTUZUMAB light chain combinations histidine scanning and alanine scanning variants.

[0078] FIGS. 8a to 8j: Binding of histidine scanning and alanine scanning variants of TELISOTUZUMAB to MET by biolayer interferometry. MYT4201-MYT4210, light chain combination histidine scanning and alanine scanning variants, were captured on anti-human Fc biosensors and associated with MET at low pH or high pH, as specified in the figures.

[0079] FIG. 9: SDS PAGE for TELISOTUZUMAB histidine scanning and alanine scanning. Expi293 cell culture supernatants post-harvest were loaded on non-reduced SDS PAGE gels to confirm expression of TELISOTUZUMAB histidine scanning and alanine scanning variants. Arrows show the corresponding size for an IgG on a non-reduced SDS PAGE gel. MYT3451-MYT3492, MYT3603-MYT3616, and MYT4211-MYT4220 are TELISOTUZUMAB paired heavy and light chain histidine scanning and alanine scanning variants, combining light chain histidine and alanine scanning variants or light chain combination histidine scanning and alanine scanning variants with heavy chain histidine and alanine scanning variants or heavy chain combination histidine scanning and alanine scanning variants.

[0080] FIGS. 10a to 10bn: Binding of histidine scanning and alanine scanning variants of TELISOTUZUMAB to MET by biolayer interferometry. MYT3451-MYT3492, MYT3603-MYT3616, and MYT4211-MYT4220, paired heavy and light chain histidine scanning and alanine scanning variants, combining light chain histidine and alanine scanning variants or light chain combination histidine scanning and alanine scanning variants with heavy chain histidine and alanine scanning variants or heavy chain combination histidine scanning and alanine scanning variants, were captured on anti-human Fc biosensors and associated with MET at low pH or high pH, as specified in the figures.

[0081] FIG. 11: SDS PAGE for TELISOTUZUMAB histidine scanning and alanine scanning. Expi293 cell culture supernatants post-harvest were loaded on non-reduced SDS PAGE gels to confirm expression of TELISOTUZUMAB histidine scanning and alanine scanning variants. Arrows show the corresponding size for an IgG on a non-reduced SDS PAGE gel. MYT4951-MYT4989 are TELISOTUZUMAB heavy chain combinations histidine scanning and alanine scanning variants.

[0082] FIG. 12: Internalization and endolysosomal delivery of histidine scanning and alanine scanning variants of TELISOTUZUMAB in Detroit 562 cells. MYT4894 (TELISOTUZUMAB) and MYT4953 and MYT4970, heavy chain combination histidine scanning and alanine scanning variants, were assayed for internalization on Detroit 562 cells using Incucyte Human FabFluor-pH red antibody labeling reagent at the indicated timepoint and final concentration of ABPC. Fold-increases in internalization and endolysosomal delivery are indicated by the numbers above each variant.

[0083] FIGS. 13a to 13b: Binding of histidine scanning and alanine scanning variants of TELISOTUZUMAB to MET by biolayer interferometry. MYT4953 and MYT4970, heavy chain combination histidine scanning and alanine scanning variants, were captured on anti-human Fc biosensors and associated with MET at pH 7.4. Dissociation was at pH 7.4 (black trace) or pH 5.4 (grey trace).

[0084] FIG. 14: SDS PAGE for TELISOTUZUMAB histidine scanning and alanine scanning. Expi293 cell culture supernatants post-harvest were loaded on non-reduced SDS PAGE gels to confirm expression of TELISOTUZUMAB histidine scanning and alanine scanning variants. Arrows show the corresponding size for an IgG on a non-reduced SDS PAGE gel. MYT4990-MYT4994 are TELISOTUZUMAB light chain combinations histidine scanning and alanine scanning variants.

[0085] FIG. 15: Construct identifier to SEQ ID NO correspondence table. Constructs, heavy chain histidine scanning and alanine scanning variants, are listed in the first column of the table, SEQ ID NOs are listed and correspond to constructs on the left and the appropriate heavy chain and/or light chain categories along the top.

[0086] FIG. 16: Construct identifier to SEQ ID NO correspondence table. Constructs, light chain histidine scanning and alanine scanning variants, are listed in the first column of the table, SEQ ID NOs are listed and correspond to constructs on the left and the appropriate heavy chain and/or light chain categories along the top.

[0087] FIG. 17: Construct identifier to SEQ ID NO correspondence table. Constructs, heavy chain combinations histidine scanning and alanine scanning variants, are listed in the first column of the table, SEQ ID NOs are listed and correspond to constructs on the left and the appropriate heavy chain and/or light chain categories along the top.

[0088] FIG. 18: Construct identifier to SEQ ID NO correspondence table. Constructs, light chain combinations histidine scanning and alanine scanning variants, are listed in the first column of the table, SEQ ID NOs are listed and correspond to constructs on the left and the appropriate heavy chain and/or light chain categories along the top.

[0089] FIG. 19: Construct identifier to SEQ ID NO correspondence table. Constructs, paired heavy and light chain histidine scanning and alanine scanning variants, combining light chain histidine and alanine scanning variants or light chain combination histidine scanning and alanine scanning variants with heavy chain histidine and alanine scanning variants or heavy chain combination histidine scanning and alanine scanning variants, are listed in the first column of the table, SEQ ID NOs are listed and correspond to constructs on the left and the appropriate heavy chain and/or light chain categories along the top.

[0090] FIG. 20: Construct identifier to SEQ ID NO correspondence table. Constructs, heavy chain combinations histidine scanning and alanine scanning variants, are listed in the first column of the table, SEQ ID NOs are listed and correspond to constructs on the left and the appropriate heavy chain and/or light chain categories along the top.

[0091] FIG. 21: Construct identifier to SEQ ID NO correspondence table. Constructs, light chain combinations histidine scanning and alanine scanning variants, are listed in the first column of the table, SEQ ID NOs are listed and correspond to constructs on the left and the appropriate heavy chain and/or light chain categories along the top.

[0092] FIG. 22: SDS PAGE for EMIBETUZUMAB histidine scanning and alanine scanning. Expi293 cell culture supernatants post-harvest were loaded on non-reduced SDS PAGE gels to confirm expression of EMIBETUZUMAB and histidine scanning and alanine scanning variants. Arrows show the corresponding size for an IgG on a non-reduced SDS PAGE gel. MYT2313 is EMIBETUZUMAB and the rest of the lanes (MYT2314-MYT2348) are EMIBETUZUMAB heavy chain histidine scanning and alanine scanning variants.

[0093] FIGS. 23a to 23aj: Binding of EMIBETUZUMAB starting ABPC and histidine scanning and alanine scanning variants to MET by biolayer interferometry. MYT2313 (EMIBETUZUMAB) and MYT2314-MYT2348, heavy chain histidine scanning and alanine scanning variants, were captured on anti-human Fc biosensors and associated with MET at low pH or high pH, as specified in the figures.

[0094] FIG. 24: SDS PAGE for EMIBETUZUMAB histidine scanning and alanine scanning. Expi293 cell culture supernatants post-harvest were loaded on non-reduced SDS PAGE gels to confirm expression of EMIBETUZUMAB and histidine scanning and alanine scanning variants. Arrows show the corresponding size for an IgG on a non-reduced SDS PAGE gel. MYT3958-MYT3985 are EMIBETUZUMAB light chain histidine scanning and alanine scanning variants.

[0095] FIGS. 25a to 25ab: Binding of histidine scanning and alanine scanning variants of EMIBETUZUMAB to MET by biolayer interferometry. MYT3958-MYT3985, light chain histidine scanning and alanine scanning variants, were captured on anti-human Fc biosensors and associated with MET at low pH or high pH, as specified in the figures.

[0096] FIG. 26: SDS PAGE for EMIBETUZUMAB histidine scanning and alanine scanning. Expi293 cell culture supernatants post-harvest were loaded on non-reduced SDS PAGE gels to confirm expression of EMIBETUZUMAB histidine scanning and alanine scanning variants. Arrows show the corresponding size for an IgG on a non-reduced SDS PAGE gel. MYT2848-MYT2867 are EMIBETUZUMAB heavy chain combinations histidine scanning and alanine scanning variants.

[0097] FIGS. 27a to 27t: Binding of histidine scanning and alanine scanning variants of EMIBETUZUMAB to MET by biolayer interferometry. MYT2848-MYT2867, heavy chain combination histidine scanning and alanine scanning variants, were captured on anti-human Fc biosensors and associated with MET at low pH or high pH, as specified in the figures.

[0098] FIG. 28: SDS PAGE for EMIBETUZUMAB histidine scanning and alanine scanning. Expi293 cell culture supernatants post-harvest were loaded on non-reduced SDS PAGE gels to confirm expression of EMIBETUZUMAB histidine scanning and alanine scanning variants. Arrows show the corresponding size for an IgG on a non-reduced SDS PAGE gel. MYT4326-MYT4345 are EMIBETUZUMAB light chain combinations histidine scanning and alanine scanning variants.

[0099] FIGS. 29a to 29t: Binding of histidine scanning and alanine scanning variants of EMIBETUZUMAB to MET by biolayer interferometry. MYT4326-MYT4345, light chain combination histidine scanning and alanine scanning variants, were captured on anti-human Fc biosensors and associated with MET at low pH or high pH, as specified in the figures.

[0100] FIG. 30: SDS PAGE for EMIBETUZUMAB histidine scanning and alanine scanning. Expi293 cell culture supernatants post-harvest were loaded on non-reduced SDS PAGE gels to confirm expression of EMIBETUZUMAB histidine scanning and alanine scanning variants. Arrows show the corresponding size for an IgG on a non-reduced SDS PAGE gel. MYT3999-MYT4042 are EMIBETUZUMAB paired heavy and light chain histidine scanning and alanine scanning variants, combining light chain histidine and alanine scanning variants or light chain combination histidine scanning and alanine scanning variants with heavy chain histidine and alanine scanning variants or heavy chain combination histidine scanning and alanine scanning variants.

[0101] FIGS. 31a to 31ar: Binding of histidine scanning and alanine scanning variants of EMIBETUZUMAB to MET by biolayer interferometry. MYT3999-MYT4042, paired heavy and light chain histidine scanning and alanine scanning variants, combining light chain histidine and alanine scanning variants or light chain combination histidine scanning and alanine scanning variants with heavy chain histidine and alanine scanning variants or heavy chain combination histidine scanning and alanine scanning variants, were captured on anti-human Fc biosensors and associated with MET at low pH or high pH, as specified in the figures.

[0102] FIG. 32: SDS PAGE for EMIBETUZUMAB histidine scanning and alanine scanning. Expi293 cell culture supernatants post-harvest were loaded on non-reduced SDS PAGE gels to confirm expression of EMIBETUZUMAB histidine scanning and alanine scanning variants. Arrows show the corresponding size for an IgG on a non-reduced SDS PAGE gel. MYT4995-MYT5041 are EMIBETUZUMAB heavy chain combinations histidine scanning and alanine scanning variants.

[0103] FIG. 33: Construct identifier to SEQ ID NO correspondence table. Constructs, heavy chain histidine scanning and alanine scanning variants, are listed in the first column of the table, SEQ ID NOs are listed and correspond to constructs on the left and the appropriate heavy chain and/or light chain categories along the top.

[0104] FIG. 34: Construct identifier to SEQ ID NO correspondence table. Constructs, light chain histidine scanning and alanine scanning variants, are listed in the first column of the table, SEQ ID NOs are listed and correspond to constructs on the left and the appropriate heavy chain and/or light chain categories along the top.

[0105] FIG. 35: Construct identifier to SEQ ID NO correspondence table. Constructs, heavy chain combinations histidine scanning and alanine scanning variants, are listed in the first column of the table, SEQ ID NOs are listed and correspond to constructs on the left and the appropriate heavy chain and/or light chain categories along the top.

[0106] FIG. 36: Construct identifier to SEQ ID NO correspondence table. Constructs, light chain combinations histidine scanning and alanine scanning variants, are listed in the first column of the table, SEQ ID NOs are listed and correspond to constructs on the left and the appropriate heavy chain and/or light chain categories along the top.

[0107] FIG. 37: Construct identifier to SEQ ID NO correspondence table. Constructs, paired heavy and light chain histidine scanning and alanine scanning variants, combining light chain histidine and alanine scanning variants or light chain combination histidine scanning and alanine scanning variants with heavy chain histidine and alanine scanning variants or heavy chain combination histidine scanning and alanine scanning variants, are listed in the first column of the table, SEQ ID NOs are listed and correspond to constructs on the left and the appropriate heavy chain and/or light chain categories along the top.

[0108] FIG. 38: Construct identifier to SEQ ID NO correspondence table. Constructs, heavy chain combinations histidine scanning and alanine scanning variants, are listed in the first column of the table, SEQ ID NOs are listed and correspond to constructs on the left and the appropriate heavy chain and/or light chain categories along the top.

[0109] FIG. 39: SDS PAGE for hucMET27Gv1.3 histidine scanning and alanine scanning. Expi293 cell culture supernatants post-harvest were loaded on non-reduced SDS PAGE gels to confirm expression of hucMET27Gv1.3 and histidine scanning and alanine scanning variants. Arrows show the corresponding size for an IgG on a non-reduced SDS PAGE gel. MYT3617 is hucMET27Gv1.3 and the rest of the lanes (MYT3618-MYT3655) are hucMET27Gv1.3 heavy chain histidine scanning and alanine scanning variants.

[0110] FIGS. 40a to 40am: Binding of hucMET27Gv1.3 starting ABPC and histidine scanning and alanine scanning variants to MET by biolayer interferometry. MYT3617 (hucMET27Gv1.3) and MYT3618-MYT3655, heavy chain histidine scanning and alanine scanning variants, were captured on anti-human Fc biosensors and associated with MET at low pH or high pH, as specified in the figures.

[0111] FIG. 41: SDS PAGE for hucMET27Gv1.3 histidine scanning and alanine scanning. Expi293 cell culture supernatants post-harvest were loaded on non-reduced SDS PAGE gels to confirm expression of hucMET27Gv1.3 and histidine scanning and alanine scanning variants. Arrows show the corresponding size for an IgG on a non-reduced SDS PAGE gel. MYT3656-MYT3686 are hucMET27Gv1.3 light chain histidine scanning and alanine scanning variants.

[0112] FIGS. 42a to 4ae: Binding of hucMET27Gv1.3 histidine scanning and alanine scanning variants to MET by biolayer interferometry. MYT3656-MYT3686, light chain histidine scanning and alanine scanning variants, were captured on anti-human Fc biosensors and associated with MET at low pH or high pH, as specified in the figures.

[0113] FIG. 43: SDS PAGE for hucMET27Gv1.3 histidine scanning and alanine scanning. Expi293 cell culture supernatants post-harvest were loaded on non-reduced SDS PAGE gels to confirm expression of hucMET27Gv1.3 histidine scanning and alanine scanning variants. Arrows show the corresponding size for an IgG on a non-reduced SDS PAGE gel. MYT4285-MYT4304 are hucMET27Gv1.3 heavy chain combinations histidine scanning and alanine scanning variants.

[0114] FIGS. 44a to 44t: Binding of histidine scanning and alanine scanning variants of hucMET27Gv1.3 to MET by biolayer interferometry. MYT4285-MYT4304, heavy chain combination histidine scanning and alanine scanning variants, were captured on anti-human Fc biosensors and associated with MET at low pH or high pH, as specified in the figures.

[0115] FIG. 45: SDS PAGE for hucMET27Gv1.3 histidine scanning and alanine scanning. Expi293 cell culture supernatants post-harvest were loaded on non-reduced SDS PAGE gels to confirm expression of hucMET27Gv1.3 histidine scanning and alanine scanning variants. Arrows show the corresponding size for an IgG on a non-reduced SDS PAGE gel. MYT4222-MYT4241 are hucMET27Gv1.3 light chain combinations histidine scanning and alanine scanning variants.

[0116] FIGS. 46a to 46t: Binding of histidine scanning and alanine scanning variants of hucMET27Gv1.3 to MET by biolayer interferometry. MYT4222-MYT4241, light chain combination histidine scanning and alanine scanning variants, were captured on anti-human Fc biosensors and associated with MET at low pH or high pH, as specified in the figures.

[0117] FIG. 47: SDS PAGE for hucMET27Gv1.3 histidine scanning and alanine scanning. Expi293 cell culture supernatants post-harvest were loaded on non-reduced SDS PAGE gels to confirm expression of hucMET27Gv1.3 histidine scanning and alanine scanning variants. Arrows show the corresponding size for an IgG on a non-reduced SDS PAGE gel. MYT5296 and MYT5042-MYT5065 are hucMET27Gv1.3 heavy chain combinations histidine scanning and alanine scanning variants.

[0118] FIG. 48: SDS PAGE for hucMET27Gv1.3 histidine scanning and alanine scanning. Expi293 cell culture supernatants post-harvest were loaded on non-reduced SDS PAGE gels to confirm expression of hucMET27Gv1.3 histidine scanning and alanine scanning variants. Arrows show the corresponding size for an IgG on a non-reduced SDS PAGE gel. MYT5066-MYT5121 are hucMET27Gv1.3 light chain combinations histidine scanning and alanine scanning variants.

[0119] FIG. 49a-49f: Internalization and endolysosomal delivery of histidine scanning and alanine scanning variants of hucMET27Gv1.3 in Detroit 562 cells. MYT4284 (hucMET27Gv1.3) and light chain combination histidine scanning and alanine scanning variants, as specified in the figures, were assayed for internalization on Detroit 562 cells using Incucyte Human FabFluor-pH red antibody labeling reagent at the indicated timepoint and final concentration of ABPC. Fold-increases in internalization and endolysosomal delivery are indicated by the numbers above each variant.

[0120] FIGS. 50a to 50v: Binding of histidine scanning and alanine scanning variants of hucMET27Gv1.3 to MET by biolayer interferometry. Light chain combination histidine scanning and alanine scanning variants of hucMET27Gv1.3, as specified in the figures, were captured on anti-human Fc biosensors and associated with MET at pH 7.4. Dissociation was at pH 7.4 (black trace) or pH 5.4 (grey trace).

[0121] FIG. 51: Construct identifier to SEQ ID NO correspondence table. Constructs, heavy chain histidine scanning and alanine scanning variants, are listed in the first column of the table, SEQ ID NOs are listed and correspond to constructs on the left and the appropriate heavy chain and/or light chain categories along the top.

[0122] FIG. 52: Construct identifier to SEQ ID NO correspondence table. Constructs, light chain histidine scanning and alanine scanning variants, are listed in the first column of the table, SEQ ID NOs are listed and correspond to constructs on the left and the appropriate heavy chain and/or light chain categories along the top.

[0123] FIG. 53: Construct identifier to SEQ ID NO correspondence table. Constructs, heavy chain combinations histidine scanning and alanine scanning variants, are listed in the first column of the table, SEQ ID NOs are listed and correspond to constructs on the left and the appropriate heavy chain and/or light chain categories along the top.

[0124] FIG. 54: Construct identifier to SEQ ID NO correspondence table. Constructs, light chain combinations histidine scanning and alanine scanning variants, are listed in the first column of the table, SEQ ID NOs are listed and correspond to constructs on the left and the appropriate heavy chain and/or light chain categories along the top.

[0125] FIG. 55: Construct identifier to SEQ ID NO correspondence table. Constructs, heavy chain combinations histidine scanning and alanine scanning variants, are listed in the first column of the table, SEQ ID NOs are listed and correspond to constructs on the left and the appropriate heavy chain and/or light chain categories along the top.

[0126] FIG. 56: Construct identifier to SEQ ID NO correspondence table. Constructs, light chain combinations histidine scanning and alanine scanning variants, are listed in the first column of the table, SEQ ID NOs are listed and correspond to constructs on the left and the appropriate heavy chain and/or light chain categories along the top.

[0127] FIG. 57: SDS PAGE for P3D12 histidine scanning and alanine scanning. Expi293 cell culture supernatants post-harvest were loaded on non-reduced SDS PAGE gels to confirm expression of P3D12 and histidine scanning and alanine scanning variants. Arrows show the corresponding size for an IgG on a non-reduced SDS PAGE gel. MYT3687 is P3D12 and the rest of the lanes (MYT3688-MYT3726) are P3D12 heavy chain histidine scanning and alanine scanning variants.

[0128] FIGS. 58a to 58an: Binding of P3D12 starting ABPC and histidine scanning and alanine scanning variants to MET by biolayer interferometry. MYT3687 (P3D12) and MYT3688-MYT3726, heavy chain histidine scanning and alanine scanning variants, were captured on anti-human Fc biosensors and associated with MET at low pH or high pH, as specified in the figures.

[0129] FIG. 59: SDS PAGE for P3D12 histidine scanning and alanine scanning. Expi293 cell culture supernatants post-harvest were loaded on non-reduced SDS PAGE gels to confirm expression of P3D12 and histidine scanning and alanine scanning variants. Arrows show the corresponding size for an IgG on a non-reduced SDS PAGE gel. MYT3727-MYT3754 are P3D12 light chain histidine scanning and alanine scanning variants.

[0130] FIGS. 60a to 60ab: Binding of P3D12 histidine scanning and alanine scanning variants to MET by biolayer interferometry. MYT3727-MYT3754, light chain histidine scanning and alanine scanning variants, were captured on anti-human Fc biosensors and associated with MET at low pH or high pH, as specified in the figures.

[0131] FIG. 61: SDS PAGE for P3D12 histidine scanning and alanine scanning. Expi293 cell culture supernatants post-harvest were loaded on non-reduced SDS PAGE gels to confirm expression of P3D12 histidine scanning and alanine scanning variants. Arrows show the corresponding size for an IgG on a non-reduced SDS PAGE gel. MYT4306-MYT4325 are P3D12 heavy chain combinations histidine scanning and alanine scanning variants.

[0132] FIGS. 62a to 62t: Binding of histidine scanning and alanine scanning variants of P3D12 to MET by biolayer interferometry. MYT4306-MYT4325, heavy chain combination histidine scanning and alanine scanning variants, were captured on anti-human Fc biosensors and associated with MET at low pH or high pH, as specified in the figures.

[0133] FIG. 63: SDS PAGE for P3D12 histidine scanning and alanine scanning. Expi293 cell culture supernatants post-harvest were loaded on non-reduced SDS PAGE gels to confirm expression of P3D12 histidine scanning and alanine scanning variants. Arrows show the corresponding size for an IgG on a non-reduced SDS PAGE gel. MYT4242-MYT4261 are P3D12 light chain combinations histidine scanning and alanine scanning variants.

[0134] FIGS. 64a to 64t: Binding of histidine scanning and alanine scanning variants of P3D12 to MET by biolayer interferometry. MYT4242-MYT4261, light chain combination histidine scanning and alanine scanning variants, were captured on anti-human Fc biosensors and associated with MET at low pH or high pH, as specified in the figures.

[0135] FIG. 65: SDS PAGE for P3D12 histidine scanning and alanine scanning. Expi293 cell culture supernatants post-harvest were loaded on non-reduced SDS PAGE gels to confirm expression of P3D12 histidine scanning and alanine scanning variants. Arrows show the corresponding size for an IgG on a non-reduced SDS PAGE gel. MYT5122-MYT5221 are P3D12 heavy chain combinations histidine scanning and alanine scanning variants.

[0136] FIG. 66a-66e: Internalization and endolysosomal delivery of histidine scanning and alanine scanning variants of P3D12 in Detroit 562 cells. MYT4305 (P3D12) and heavy chain combination histidine scanning and alanine scanning variants, as specified in the figures, were assayed for internalization on Detroit 562 cells using Incucyte Human FabFluor-pH red antibody labeling reagent at the indicated timepoint and final concentration of ABPC. Fold-increases in internalization and endolysosomal delivery are indicated by the numbers above each variant.

[0137] FIGS. 67a-67e: Binding of histidine scanning and alanine scanning variants of P3D12 to MET by biolayer interferometry. Heavy chain combination histidine scanning and alanine scanning variants of P3D12, as specified in the figures, were captured on anti-human Fc biosensors and associated with MET at pH 7.4. Dissociation was at pH 7.4 (black trace) or pH 5.4 (grey trace).

[0138] FIG. 68: SDS PAGE for P3D12 histidine scanning and alanine scanning. Expi293 cell culture supernatants post-harvest were loaded on non-reduced SDS PAGE gels to confirm expression of P3D12 histidine scanning and alanine scanning variants. Arrows show the corresponding size for an IgG on a non-reduced SDS PAGE gel. MYT5222-MYT5295 are P3D12 light chain combinations histidine scanning and alanine scanning variants.

[0139] FIG. 69: Internalization and endolysosomal delivery of histidine scanning and alanine scanning variant of P3D12 in Detroit 562 cells. MYT4305 (P3D12) and light chain combination histidine scanning and alanine scanning variant of P3D12, MYT5237, were assayed for internalization on Detroit 562 cells using Incucyte Human FabFluor-pH red antibody labeling reagent at the indicated timepoint and final concentration of ABPC. Fold-increases in internalization and endolysosomal delivery are indicated by the numbers above each variant.

[0140] FIG. 70: Binding of histidine scanning and alanine scanning variant of P3D12 to MET by biolayer interferometry. Light chain combination histidine scanning and alanine scanning variant of P3D12, MYT5237, was captured on anti-human Fc biosensors and associated with MET at pH 7.4. Dissociation was at pH 7.4 (black trace) or pH 5.4 (grey trace).

[0141] FIG. 71: Construct identifier to SEQ ID NO correspondence table. Constructs, heavy chain histidine scanning and alanine scanning variants, are listed in the first column of the table, SEQ ID NOs are listed and correspond to constructs on the left and the appropriate heavy chain and/or light chain categories along the top.

[0142] FIG. 72: Construct identifier to SEQ ID NO correspondence table. Constructs, light chain histidine scanning and alanine scanning variants, are listed in the first column of the table, SEQ ID NOs are listed and correspond to constructs on the left and the appropriate heavy chain and/or light chain categories along the top.

[0143] FIG. 73: Construct identifier to SEQ ID NO correspondence table. Constructs, heavy chain combinations histidine scanning and alanine scanning variants, are listed in the first column of the table, SEQ ID NOs are listed and correspond to constructs on the left and the appropriate heavy chain and/or light chain categories along the top.

[0144] FIG. 74: Construct identifier to SEQ ID NO correspondence table. Constructs, light chain combinations histidine scanning and alanine scanning variants, are listed in the first column of the table, SEQ ID NOs are listed and correspond to constructs on the left and the appropriate heavy chain and/or light chain categories along the top.

[0145] FIG. 75: Construct identifier to SEQ ID NO correspondence table. Constructs, heavy chain combinations histidine scanning and alanine scanning variants, are listed in the first column of the table, SEQ ID NOs are listed and correspond to constructs on the left and the appropriate heavy chain and/or light chain categories along the top.

[0146] FIG. 76: Construct identifier to SEQ ID NO correspondence table. Constructs, light chain combinations histidine scanning and alanine scanning variants, are listed in the first column of the table, SEQ ID NOs are listed and correspond to constructs on the left and the appropriate heavy chain and/or light chain categories along the top.

[0147] FIG. 77: SDS PAGE for reformatting of anti-MET ABPCs. Expi293 cell culture supernatants post-harvest were loaded on non-reduced SDS PAGE gels to confirm expression of starting ABPCs and histidine scanning and alanine scanning variants. Arrows show the corresponding size for an IgG on a non-reduced SDS PAGE gel.

[0148] FIGS. 78a-78l: Binding of starting ABPCs and histidine scanning and alanine scanning variants to MET by biolayer interferometry. Starting ABPCs and histidine scanning and alanine scanning variants were captured on anti-human Fc biosensors, as specified in the figures, and associated with MET at pH 7.4. Dissociation was at pH 7.4 (black trace) or pH 5.4 (grey trace).

[0149] FIGS. 79a-79f: Internalization and endolysosomal delivery of starting anti-MET ABPCs and histidine scanning and alanine scanning variants in Detroit 562 cells. Starting ABPCs and histidine scanning and alanine scanning variants, as specified in the figures, were assayed for internalization on Detroit 562 cells using Incucyte Human FabFluor-pH red antibody labeling reagent at the indicated timepoint and final concentration of ABPC. Fold-increases in internalization and endolysosomal delivery are indicated by the numbers above each variant.

[0150] FIGS. 80a-80d: Reformatting of ABPCs construct identifier correspondence table. IgG1 starting ABPCs and histidine scanning and alanine scanning variants are listed in the first column of the table. IgG1 with TH and YTE mutations constructs with the same heavy and light variable regions as the IgG1 construct in the same row are listed in the second column.

[0151] FIG. 81: Internalization of anti-MET mAbs in cells. Anti-MET pH engineered antibody variants, corresponding starting ABPC antibodies, control IgG1 isotype control (BP0297, Bioxcell), along with a vehicle control, as specified in FIGS. 81a-81aj were assayed for internalization and endolysosomal delivery as measured by mean fluorescence intensity on cells, as specified in the figures, at 24 hours. Error bars represent standard deviation. Numbers above the bars represent fold change over the corresponding starting ABPC.

[0152] FIG. 82: SDS PAGE for P3D12 histidine scanning and alanine scanning. Expi293 cell culture supernatants post-harvest were loaded on non-reduced SDS PAGE gels to confirm expression of P3D12 histidine scanning and alanine scanning variants. Arrows show the corresponding size for an IgG on a non-reduced SDS PAGE gel. MYT5342-MYT5381 are P3D12 paired heavy and light chain histidine scanning and alanine scanning variants, combining light chain histidine and alanine scanning variants or light chain combination histidine scanning and alanine scanning variants with heavy chain histidine and alanine scanning variants or heavy chain combination histidine scanning and alanine scanning variants.

[0153] FIGS. 83a to 83an: Binding of histidine scanning and alanine scanning variants of P3D12 to MET by biolayer interferometry. MYT5342-MYT5381, paired heavy and light chain histidine scanning and alanine scanning variants, combining light chain histidine and alanine scanning variants or light chain combination histidine scanning and alanine scanning variants with heavy chain histidine and alanine scanning variants or heavy chain combination histidine scanning and alanine scanning variants, were captured on anti-human Fc biosensors and associated with MET at pH 7.4. Dissociation was at pH 7.4 (black trace) or pH 5.4 (grey trace).

[0154] FIG. 84: Construct identifier to SEQ ID NO correspondence table. Constructs, paired heavy and light chain histidine scanning and alanine scanning variants, combining light chain histidine and alanine scanning variants or light chain combination histidine scanning and alanine scanning variants with heavy chain histidine and alanine scanning variants or heavy chain combination histidine scanning and alanine scanning variants, are listed in the first column of the table, SEQ ID NOs are listed and correspond to constructs on the left and the appropriate heavy chain and/or light chain categories along the top

[0155] FIG. 85: Melting temperature of select anti-MET mAbs. Selected anti-MET mAbs listed in the table were assayed for their melting temperature by Differential Scanning Flourimetry (DSF), and the resulting Sypro Orange signal was plotted as its first derivative. Melting temperature (Tm) was calculated as the local maxima of this graph and is shown in the table.

### DETAILED DESCRIPTION

[0156] Provided herein are antigen-binding protein constructs (ABPCs) that include: a first antigen-binding domain that is capable of specifically binding MET or an epitope of MET presented on the surface of a target mammalian cell, where: (a) the dissociation rate of the first antigen-binding domain at a pH of about 4.0 to about 6.5 is faster than the dissociation rate at a pH of about 7.0 to about 8.0; and/or (b) the dissociation constant (K_{D}) of the first antigen-binding domain at a pH of about 4.0 to about 6.5 is greater than the K_{D} at a pH of about 7.0 to about 8.0. In some examples of these ABPCs, the ABPC is degraded in the target mammalian cell following internalization of the ABPC by the target mammalian cell. Some examples of any of the ABPCs described herein can further include a conjugated toxin, radioisotope, drug, or small molecule (e.g., a fluorophore or dye).

[0157] Also provided are antigen-binding protein constructs (ABPCs) that include: a first antigen-binding domain that is capable of specifically binding MET or an epitope of MET presented on the surface of a target mammalian cell; and a conjugated toxin, radioisotope, drug, or small molecule, where: (a) the dissociation rate of the first antigen-binding domain at a pH of about 4.0 to about 6.5 is faster than the dissociation rate at a pH of about 7.0 to about 8.0; and/or the dissociation constant (K_{D}) of the first antigen-binding domain at a pH of about 4.0 to about 6.5 is greater than the K_{D} at a pH of about 7.0 to about 8.0; and (b) a composition including the ABPC provides for one or more (e.g., two or three) of: an increase (e.g., a detectable increase) in toxin liberation in the target mammalian cell as compared to a composition comprising the same amount of a control ABPC; an increase (e.g., a detectable increase) in target mammalian cell killing as compared to a composition comprising the same amount of a control ABPC; and an increase (e.g., a detectable increase) in endolysosomal delivery in the target mammalian cell as compared to a composition comprising the same amount of a control ABPC.

[0158] In some examples of any of the ABPCs described herein, the first antigen-binding domain includes a heavy chain variable domain of a Telisotuzumab with one or more (e.g., one, two, three, four, five, six, seven, eight, nine, ten, eleven, twelve, thirteen, fourteen, fifteen, sixteen, seventeen, eighteen, nineteen, or twenty) amino acids substituted with a histidine. In some examples of any of the ABPCs described herein, the first antigen-binding domain includes a light chain variable domain of Telisotuzumab with one or more (e.g., one, two, three, four, five, six, seven, eight, nine, ten, eleven, twelve, thirteen, fourteen, fifteen, sixteen, seventeen, eighteen, nineteen, or twenty) amino acids substituted with a histidine. In some examples of any of the ABPCs described herein, the first antigen-binding domain includes a heavy chain variable domain of Telisotuzumab with one or more (e.g., one, two, three, four, five, six, seven, eight, nine, ten, eleven, twelve, thirteen, fourteen, fifteen, sixteen, seventeen, eighteen, nineteen, or twenty) amino acids substituted with a histidine; and a light chain variable domain of Telisotuzumab with one or more (e.g., one, two, three, four, five, six, seven, eight, nine, ten, eleven, twelve, thirteen, fourteen, fifteen, sixteen, seventeen, eighteen, nineteen, or twenty) amino acids substituted with a histidine. In some examples of any of the ABPCs described herein, the heavy chain variable domain of Telisotuzumab comprises SEQ ID NO: 1. In some examples of any of the ABPCs described herein, the light chain variable domain of Telisotuzumab comprises SEQ ID NO: 2.

[0159] In some examples of any of the ABPCs described herein, the first antigen-binding domain comprises a heavy chain variable domain comprising a CDR1, a CDR2, and a CDR3 of SEQ ID NO: 3, SEQ ID NO: 4, and SEQ ID NO: 5, respectively, with collectively a total of one or more (e.g., one, two, three, four, five, six, seven, eight, nine, or ten) amino acid positions in SEQ ID NOs: 3-5 substituted with a histidine. In some examples of any of the ABPCs described herein, the first antigen-binding domain comprises a light chain variable domain comprising a CDR1, a CDR2, and a CDR3 of SEQ ID NO: 6, SEQ ID NO: 7, and SEQ ID NO: 8, respectively, with collectively a total of one or more (e.g., one, two, three, four, five, six, seven, eight, nine, or ten) amino acid positions in SEQ ID NOs: 6-8 substituted with a histidine. In some examples of any of the ABPCs described herein, the first antigen-binding domain includes: a heavy chain variable domain comprising a CDR1, a CDR2, and a CDR3 of SEQ ID NO: 3, SEQ ID NO: 4, and SEQ ID NO: 5, respectively, with collectively a total of one or more (e.g., one, two, three, four, five, six, seven, eight, nine, or ten) amino acid positions in SEQ ID NOs: 3-5 substituted with a histidine; and a light chain variable domain comprising a CDR1, a CDR2, and a CDR3 of SEQ ID NO: 6, SEQ ID NO: 7, and SEQ ID NO: 8, respectively, with collectively a total of one or more (e.g., one, two, three, four, five, six, seven, eight, nine, or ten) amino acid positions in SEQ ID NOs: 6-8 substituted with a histidine.

[0160] In some examples of any of the ABPCs described herein, the first antigen-binding domain includes a heavy chain variable domain that is at least 90% (e.g., at least 92%, at least 94%, at least 96%, at least 98%, at least 99%, or 100%) identical to SEQ ID NO: 1, where the heavy chain variable domain includes a histidine at one or more (e.g., one, two, three, four, five, six, seven, eight, nine, ten, eleven, twelve, thirteen, fourteen, fifteen, sixteen, seventeen, eighteen, nineteen, or twenty) amino acid positions in SEQ ID NO: 1 selected from the group consisting of: 26, 27, 28, 29, 32, 97, 98, 99, 100, 101, 102, 103, and 107. In some examples of any of the ABPCs described herein, the first antigen-binding domain includes a light chain variable domain that is at least 90% (e.g., at least 92%, at least 94%, at least 96%, at least 98%, at least 99%, or 100%) identical to SEQ ID NO: 2, where the light chain variable domain includes a histidine at one or more (e.g., one, two, three, four, five, six, seven, eight, nine, ten, eleven, twelve, thirteen, fourteen, fifteen, sixteen, seventeen, eighteen, nineteen, or twenty) amino acid positions in SEQ ID NO: 2 selected from the group consisting of: 25, 28, 29, 30, 31, 32, 34, 35, 36, 37, 54, 55, 59, 60, 95, 99, and 101. In some examples of any of the ABPCs described herein the first antigen-binding domain includes: a heavy chain variable domain that is at least 90% (e.g., at least 92%, at least 94%, at least 96%, at least 98%, at least 99%, or 100%) identical to SEQ ID NO: 1, where the heavy chain variable domain includes a histidine at one or more (e.g., one, two, three, four, five, six, seven, eight, nine, ten, eleven, twelve, thirteen, fourteen, fifteen, sixteen, seventeen, eighteen, nineteen, or twenty) amino acid positions in SEQ ID NO: 1 selected from the group consisting of: 26, 27, 28, 29, 32, 97, 98, 99, 100, 101, 102, 103, and 107, and a light chain variable domain that is at least 90% (e.g., at least 92%, at least 94%, at least 96%, at least 98%, at least 99%, or 100%) identical to SEQ ID NO: 2, where the light chain variable domain includes a histidine at one or more (e.g., one, two, three, four, five, six, seven, eight, nine, ten, eleven, twelve, thirteen, fourteen, fifteen, sixteen, seventeen, eighteen, nineteen, or twenty) amino acid positions in SEQ ID NO: 2 selected from the group consisting of: 25, 28, 29, 30, 31, 32, 34, 35, 36, 37, 54, 55, 59, 60, 95, 99, and 101.

[0161] In some examples of any of the ABPCs described herein, a heavy chain variable domain includes a heavy chain variable domain that is at least 90% (e.g., at least 92%, at least 94%, at least 96%, at least 98%, at least 99%, or 100%) identical to SEQ ID NO: 1, where the heavy chain variable domain includes a histidine at any of the specific combinations of one or more amino acid positions in SEQ ID NO: 1 listed in Table 1.

TABLE 1
Exemplary Combinations of Amino Acid Positions in
SEQ ID NO: 1 that can be Substituted with Histidine

26 + 27, 26 + 28, 26 + 29, 26 + 32, 26 + 97, 26 + 98, 26 + 99, 26 + 100, 26 + 101, 26 +
102, 26 + 103, 26 + 107, 27 + 28, 27 + 29, 27 + 32, 27 + 97, 27 + 98, 27 + 99, 27 + 100, 27 +
101, 27 + 102, 27 + 103, 27 + 107, 28 + 29, 28 + 32, 28 + 97, 28 + 98, 28 + 99, 28 + 100,
28 + 101, 28 + 102, 28 + 103, 28 + 107, 29 + 32, 29 + 97, 29 + 98, 29 + 99, 29 + 100, 29 +
101, 29 + 102, 29 + 103, 29 + 107, 32 + 97, 32 + 98, 32 + 99, 32 + 100, 32 + 101, 32 +
102, 32 + 103, 32 + 107, 97 + 98, 97 + 99, 97 + 100, 97 + 101, 97 + 102, 97 + 103, 97 +
107, 98 + 99, 98 + 100, 98 + 101, 98 + 102, 98 + 103, 98 + 107, 99 + 100, 99 + 101, 99 +
102, 99 + 103, 99 + 107, 100 + 101, 100 + 102, 100 + 103, 100 + 107, 101 + 102, 101 +
103, 101 + 107, 102 + 103, 102 + 107, 103 + 107, 26 + 27 + 28, 26 + 27 + 29, 26 + 27 +
32, 26 + 27 + 97, 26 + 27 + 98, 26 + 27 + 99, 26 + 27 + 100, 26 + 27 + 101, 26 + 27 + 102,
26 + 27 + 103, 26 + 27 + 107, 26 + 28 + 29, 26 + 28 + 32, 26 + 28 + 97, 26 + 28 + 98, 26 +
28 + 99, 26 + 28 + 100, 26 + 28 + 101, 26 + 28 + 102, 26 + 28 + 103, 26 + 28 + 107, 27 +
28 + 29, 27 + 28 + 32, 27 + 28 + 97, 27 + 28 + 98, 27 + 28 + 99, 27 + 28 + 100, 27 + 28 +
101, 27 + 28 + 102, 27 + 28 + 103, 27 + 28 + 107, 26 + 29 + 32, 26 + 29 + 97, 26 + 29 +
98, 26 + 29 + 99, 26 + 29 + 100, 26 + 29 + 101, 26 + 29 + 102, 26 + 29 + 103, 26 + 29 +
107, 27 + 29 + 32, 27 + 29 + 97, 27 + 29 + 98, 27 + 29 + 99, 27 + 29 + 100, 27 + 29 + 101,
27 + 29 + 102, 27 + 29 + 103, 27 + 29 + 107, 28 + 29 + 32, 28 + 29 + 97, 28 + 29 + 98, 28 +
29 + 99, 28 + 29 + 100, 28 + 29 + 101, 28 + 29 + 102, 28 + 29 + 103, 28 + 29 + 107, 26 +
32 + 97, 26 + 32 + 98, 26 + 32 + 99, 26 + 32 + 100, 26 + 32 + 101, 26 + 32 + 102, 26 +
32 + 103, 26 + 32 + 107, 27 + 32 + 97, 27 + 32 + 98, 27 + 32 + 99, 27 + 32 + 100, 27 + 32 +
101, 27 + 32 + 102, 27 + 32 + 103, 27 + 32 + 107, 28 + 32 + 97, 28 + 32 + 98, 28 + 32 +
99, 28 + 32 + 100, 28 + 32 + 101, 28 + 32 + 102, 28 + 32 + 103, 28 + 32 + 107, 29 + 32 +
97, 29 + 32 + 98, 29 + 32 + 99, 29 + 32 + 100, 29 + 32 + 101, 29 + 32 + 102, 29 + 32 +
103, 29 + 32 + 107, 26 + 97 + 98, 26 + 97 + 99, 26 + 97 + 100, 26 + 97 + 101, 26 + 97 +
102, 26 + 97 + 103, 26 + 97 + 107, 27 + 97 + 98, 27 + 97 + 99, 27 + 97 + 100, 27 + 97 +
101, 27 + 97 + 102, 27 + 97 + 103, 27 + 97 + 107, 28 + 97 + 98, 28 + 97 + 99, 28 + 97 +
100, 28 + 97 + 101, 28 + 97 + 102, 28 + 97 + 103, 28 + 97 + 107, 29 + 97 + 98, 29 + 97 +
99, 29 + 97 + 100, 29 + 97 + 101, 29 + 97 + 102, 29 + 97 + 103, 29 + 97 + 107, 32 + 97 +
98, 32 + 97 + 99, 32 + 97 + 100, 32 + 97 + 101, 32 + 97 + 102, 32 + 97 + 103, 32 + 97 +
107, 26 + 98 + 99, 26 + 98 + 100, 26 + 98 + 101, 26 + 98 + 102, 26 + 98 + 103, 26 + 98 +
107, 27 + 98 + 99, 27 + 98 + 100, 27 + 98 + 101, 27 + 98 + 102, 27 + 98 + 103, 27 + 98 +
107, 28 + 98 + 99, 28 + 98 + 100, 28 + 98 + 101, 28 + 98 + 102, 28 + 98 + 103, 28 + 98 +
107, 29 + 98 + 99, 29 + 98 + 100, 29 + 98 + 101, 29 + 98 + 102, 29 + 98 + 103, 29 + 98 +
107, 32 + 98 + 99, 32 + 98 + 100, 32 + 98 + 101, 32 + 98 + 102, 32 + 98 + 103, 32 + 98 +
107, 97 + 98 + 99, 97 + 98 + 100, 97 + 98 + 101, 97 + 98 + 102, 97 + 98 + 103, 97 + 98 +
107, 26 + 99 + 100, 26 + 99 + 101, 26 + 99 + 102, 26 + 99 + 103, 26 + 99 + 107, 27 + 99 +
100, 27 + 99 + 101, 27 + 99 + 102, 27 + 99 + 103, 27 + 99 + 107, 28 + 99 + 100, 28 + 99 +
101, 28 + 99 + 102, 28 + 99 + 103, 28 + 99 + 107, 29 + 99 + 100, 29 + 99 + 101, 29 + 99 +
102, 29 + 99 + 103, 29 + 99 + 107, 32 + 99 + 100, 32 + 99 + 101, 32 + 99 + 102, 32 + 99 +
103, 32 + 99 + 107, 97 + 99 + 100, 97 + 99 + 101, 97 + 99 + 102, 97 + 99 + 103, 97 + 99 +
107, 98 + 99 + 100, 98 + 99 + 101, 98 + 99 + 102, 98 + 99 + 103, 98 + 99 + 107, 26 + 100 +
101, 26 + 100 + 102, 26 + 100 + 103, 26 + 100 + 107, 27 + 100 + 101, 27 + 100 + 102,
27 + 100 + 103, 27 + 100 + 107, 28 + 100 + 101, 28 + 100 + 102, 28 + 100 + 103, 28 +
100 + 107, 29 + 100 + 101, 29 + 100 + 102, 29 + 100 + 103, 29 + 100 + 107, 32 + 100 +
101, 32 + 100 + 102, 32 + 100 + 103, 32 + 100 + 107, 97 + 100 + 101, 97 + 100 + 102, 97 +
100 + 103, 97 + 100 + 107, 98 + 100 + 101, 98 + 100 + 102, 98 + 100 + 103, 98 + 100 +
107, 99 + 100 + 101, 99 + 100 + 102, 99 + 100 + 103, 99 + 100 + 107, 26 + 101 + 102, 26 +
101 + 103, 26 + 101 + 107, 27 + 101 + 102, 27 + 101 + 103, 27 + 101 + 107, 28 + 101 +
102, 28 + 101 + 103, 28 + 101 + 107, 29 + 101 + 102, 29 + 101 + 103, 29 + 101 + 107, 32+
101 + 102, 32 + 101 + 103, 32 + 101 + 107, 97 + 101 + 102, 97 + 101 + 103, 97 + 101 +
107, 98 + 101 + 102, 98 + 101 + 103, 98 + 101 + 107, 99 + 101 + 102, 99 + 101 + 103, 99 +
101 + 107, 100 + 101 + 102, 100 + 101 + 103, 100 + 101 + 107, 26 + 102 + 103, 26 +
102 + 107, 27 + 102 + 103, 27 + 102 + 107, 28 + 102 + 103, 28 + 102 + 107, 29 + 102 +
103, 29 + 102 + 107, 32 + 102 + 103, 32 + 102 + 107, 97 + 102 + 103, 97 + 102 + 107, 98 +
102 + 103, 98 + 102 + 107, 99 + 102 + 103, 99 + 102 + 107, 100 + 102 + 103, 100 + 102 +
107, 101 + 102 + 103, 101 + 102 + 107, 26 + 103 + 107, 27 + 103 + 107, 28 + 103 +
107, 29 + 103 + 107, 32 + 103 + 107, 97 + 103 + 107, 98 + 103 + 107, 99 + 103 + 107, 100 +
103 + 107, 101 + 103 + 107, 102 + 103 + 107

[0162] In some examples of any of the ABPCs described herein, a light chain variable domain includes a light chain variable domain that is at least 90% (e.g., at least 92%, at least 94%, at least 96%, at least 98%, at least 99%, or 100%) identical to SEQ ID NO: 2, where the light chain variable domain includes a histidine at any of the specific combinations of one or more amino acid positions in SEQ ID NO: 2 listed in Table 2.

[0163] In some examples of any of the ABPCs described herein, the first antigen-binding domain includes a light chain variable domain that is at least 90% (e.g., at least 92%, at least 94%, at least 96%, at least 98%, at least 99%, or 100%) identical to SEQ ID NO: 2, where the light chain variable domain includes an alanine at position 38 in SEQ ID NO: 2.

[0164] In some examples of any of the ABPCs described herein the first antigen-binding domain includes: a light chain variable domain that is at least 90% (e.g., at least 92%, at least 94%, at least 96%, at least 98%, at least 99%, or 100%) identical to SEQ ID NO: 2, where the light chain variable domain includes an alanine at position 38 in SEQ ID NO: 2, and a heavy chain variable domain that is at least 90% (e.g., at least 92%, at least 94%, at least 96%, at least 98%, at least 99%, or 100%) identical to SEQ ID NO: 1, where the heavy chain variable domain includes a histidine at one or more (e.g., one, two, three, four, five, six, seven, eight, nine, ten, eleven, twelve, thirteen, fourteen, fifteen, sixteen, seventeen, eighteen, nineteen, or twenty) amino acid positions in SEQ ID NO: 1 selected from the group consisting of: 26, 27, 28, 29, 32, 97, 98, 99, 100, 101, 102, 103, and 107.

[0165] In some examples of any of the ABPCs described herein, the first antigen-binding domain includes a light chain variable domain that is at least 90% (e.g., at least 92%, at least 94%, at least 96%, at least 98%, at least 99%, or 100%) identical to SEQ ID NO: 2, where the light chain variable domain includes a histidine at one or more (e.g., one, two, three, four, five, six, seven, eight, nine, ten, eleven, twelve, thirteen, fourteen, fifteen, sixteen, seventeen, eighteen, nineteen, or twenty) amino acid positions in SEQ ID NO: 2 selected from the group consisting of: 25, 28, 29, 30, 31, 32, 34, 35, 36, 37, 54, 55, 59, 60, 95, 99, and 101, and where the light chain variable domain includes an alanine at position 38 in SEQ ID NO: 2. In some examples of any of the ABPCs described herein the first antigen-binding domain includes: a light chain variable domain that is at least 90% (e.g., at least 92%, at least 94%, at least 96%, at least 98%, at least 99%, or 100%) identical to SEQ ID NO: 2, where the light chain variable domain includes a histidine at one or more (e.g., one, two, three, four, five, six, seven, eight, nine, ten, eleven, twelve, thirteen, fourteen, fifteen, sixteen, seventeen, eighteen, nineteen, or twenty) amino acid positions in SEQ ID NO: 2 selected from the group consisting of: 25, 28, 29, 30, 31, 32, 34, 35, 36, 37, 54, 55, 59, 60, 95, 99, and 101, and where the light chain variable domain includes an alanine at position 38 in SEQ ID NO: 2, and a heavy chain variable domain that is at least 90% (e.g., at least 92%, at least 94%, at least 96%, at least 98%, at least 99%, or 100%) identical to SEQ ID NO: 1, where the heavy chain variable domain includes a histidine at one or more (e.g., one, two, three, four, five, six, seven, eight, nine, ten, eleven, twelve, thirteen, fourteen, fifteen, sixteen, seventeen, eighteen, nineteen, or twenty) amino acid positions in SEQ ID NO: 1 selected from the group consisting of: 26, 27, 28, 29, 32, 97, 98, 99, 100, 101, 102, 103, and 107.

[0166] In some examples of any of the ABPCs described herein, a light chain variable domain includes a light chain variable domain that is at least 90% (e.g., at least 92%, at least 94%, at least 96%, at least 98%, at least 99%, or 100%) identical to SEQ ID NO: 2, where the light chain variable domain includes a histidine at any of the specific combinations of one or more amino acid positions in SEQ ID NO: 2 listed in Table 2 and where the light chain variable domain includes an alanine at position 38 of SEQ ID NO: 2.

TABLE 2
Exemplary Combinations of Amino Acid Positions in
SEQ ID NO: 2 that can be Substituted with Histidine

25 + 28, 25 + 29, 25 + 30, 25 + 31, 25 + 32, 25 + 34, 25 + 35, 25 + 36, 25 + 37, 25 + 54, 25 +
55, 25 + 59, 25 + 60, 25 + 95, 25 + 99, 25 + 101, 28 + 29, 28 + 30, 28 + 31, 28 + 32, 28 +
34, 28 + 35, 28 + 36, 28 + 37, 28 + 54, 28 + 55, 28 + 59, 28 + 60, 28 + 95, 28 + 99, 28 +
101, 29 + 30, 29 + 31, 29 + 32, 29 + 34, 29 + 35, 29 + 36, 29 + 37, 29 + 54, 29 + 55, 29 +
59, 29 + 60, 29 + 95, 29 + 99, 29 + 101, 30 + 31, 30 + 32, 30 + 34, 30 + 35, 30 + 36, 30 +
37, 30 + 54, 30 + 55, 30 + 59, 30 + 60, 30 + 95, 30 + 99, 30 + 101, 31 + 32, 31 + 34, 31 +
35, 31 + 36, 31 + 37, 31 + 54, 31 + 55, 31 + 59, 31 + 60, 31 + 95, 31 + 99, 31 + 101, 32 +
34, 32 + 35, 32 + 36, 32 + 37, 32 + 54, 32 + 55, 32 + 59, 32 + 60, 32 + 95, 32 + 99, 32 +
101, 34 + 35, 34 + 36, 34 + 37, 34 + 54, 34 + 55, 34 + 59, 34 + 60, 34 + 95, 34 + 99, 34 +
101, 35 + 36, 35 + 37, 35 + 54, 35 + 55, 35 + 59, 35 + 60, 35 + 95, 35 + 99, 35 + 101, 36 +
37, 36 + 54, 36 + 55, 36 + 59, 36 + 60, 36 + 95, 36 + 99, 36 + 101, 37 + 54, 37 + 55, 37 +
59, 37 + 60, 37 + 95, 37 + 99, 37 + 101, 54 + 55, 54 + 59, 54 + 60, 54 + 95, 54 + 99, 54 +
101, 55 + 59, 55 + 60, 55 + 95, 55 + 99, 55 + 101, 59 + 60, 59 + 95, 59 + 99, 59 + 101, 60 +
95, 60 + 99, 60 + 101, 95 + 99, 95 + 101, 99 + 101, 25 + 28 + 29, 25 + 28 + 30, 25 + 28 +
31, 25 + 28 + 32, 25 + 28 + 34, 25 + 28 + 35, 25 + 28 + 36, 25 + 28 + 37, 25 + 28 + 54,
25 + 28 + 55, 25 + 28 + 59, 25 + 28 + 60, 25 + 28 + 95, 25 + 28 + 99, 25 + 28 + 101, 25 +
29 + 30, 25 + 29 + 31, 25 + 29 + 32, 25 + 29 + 34, 25 + 29 + 35, 25 + 29 + 36, 25 + 29 +
37, 25 + 29 + 54, 25 + 29 + 55, 25 + 29 + 59, 25 + 29 + 60, 25 + 29 + 95, 25 + 29 + 99, 25 +
29 + 101, 25 + 30 + 31, 25 + 30 + 32, 25 + 30 + 34, 25 + 30 + 35, 25 + 30 + 36, 25 + 30 +
37, 25 + 30 + 54, 25 + 30 + 55, 25 + 30 + 59, 25 + 30 + 60, 25 + 30 + 95, 25 + 30 + 99,
25 + 30 + 101, 25 + 31 + 32, 25 + 31 + 34, 25 + 31 + 35, 25 + 31 + 36, 25 + 31 + 37, 25 +
31 + 54, 25 + 31 + 55, 25 + 31 + 59, 25 + 31 + 60, 25 + 31 + 95, 25 + 31 + 99, 25 + 31 +
101, 25 + 32 + 34, 25 + 32 + 35, 25 + 32 + 36, 25 + 32 + 37, 25 + 32 + 54, 25 + 32 + 55,
25 + 32 + 59, 25 + 32 + 60, 25 + 32 + 95, 25 + 32 + 99, 25 + 32 + 101, 25 + 34 + 35, 25 +
34 + 36, 25 + 34 + 37, 25 + 34 + 54, 25 + 34 + 55, 25 + 34 + 59, 25 + 34 + 60, 25 + 34 +
95, 25 + 34 + 99, 25 + 34 + 101, 25 + 35 + 36, 25 + 35 + 37, 25 + 35 + 54, 25 + 35 + 55,
25 + 35 + 59, 25 + 35 + 60, 25 + 35 + 95, 25 + 35 + 99, 25 + 35 + 101, 25 + 36 + 37, 25 +
36 + 54, 25 + 36 + 55, 25 + 36 + 59, 25 + 36 + 60, 25 + 36 + 95, 25 + 36 + 99, 25 + 36 +
101, 25 + 37 + 54, 25 + 37 + 55, 25 + 37 + 59, 25 + 37 + 60, 25 + 37 + 95, 25 + 37 + 99,
25 + 37 + 101, 25 + 54 + 55, 25 + 54 + 59, 25 + 54 + 60, 25 + 54 + 95, 25 + 54 + 99, 25 +
54 + 101, 25 + 55 + 59, 25 + 55 + 60, 25 + 55 + 95, 25 + 55 + 99, 25 + 55 + 101, 25 + 59 +
60, 25 + 59 + 95, 25 + 59 + 99, 25 + 59 + 101, 25 + 60 + 95, 25 + 60 + 99, 25 + 60 + 101,
25 + 95 + 99, 25 + 95 + 101, 25 + 99 + 101, 28 + 29 + 30, 28 + 29 + 31, 28 + 29 + 32, 28 +
29 + 34, 28 + 29 + 35, 28 + 29 + 36, 28 + 29 + 37, 28 + 29 + 54, 28 + 29 + 55, 28 + 29 +
59, 28 + 29 + 60, 28 + 29 + 95, 28 + 29 + 99, 28 + 29 + 101, 28 + 30 + 31, 28 + 30 + 32,
28 + 30 + 34, 28 + 30 + 35, 28 + 30 + 36, 28 + 30 + 37, 28 + 30 + 54, 28 + 30 + 55, 28 +
30 + 59, 28 + 30 + 60, 28 + 30 + 95, 28 + 30 + 99, 28 + 30 + 101, 28 + 31 + 32, 28 + 31 +
34, 28 + 31 + 35, 28 + 31 + 36, 28 + 31 + 37, 28 + 31 + 54, 28 + 31 + 55, 28 + 31 + 59, 28 +
31 + 60, 28 + 31 + 95, 28 + 31 + 99, 28 + 31 + 101, 28 + 32 + 34, 28 + 32 + 35, 28 + 32 +
36, 28 + 32 + 37, 28 + 32 + 54, 28 + 32 + 55, 28 + 32 + 59, 28 + 32 + 60, 28 + 32 + 95,
28 + 32 + 99, 28 + 32 + 101, 28 + 34 + 35, 28 + 34 + 36, 28 + 34 + 37, 28 + 34 + 54, 28 +
34 + 55, 28 + 34 + 59, 28 + 34 + 60, 28 + 34 + 95, 28 + 34 + 99, 28 + 34 + 101, 28 + 35 +
36, 28 + 35 + 37, 28 + 35 + 54, 28 + 35 + 55, 28 + 35 + 59, 28 + 35 + 60, 28 + 35 + 95, 28 +
35 + 99, 28 + 35 + 101, 28 + 36 + 37, 28 + 36 + 54, 28 + 36 + 55, 28 + 36 + 59, 28 + 36 +
60, 28 + 36 + 95, 28 + 36 + 99, 28 + 36 + 101, 28 + 37 + 54, 28 + 37 + 55, 28 + 37 + 59,
28 + 37 + 60, 28 + 37 + 95, 28 + 37 + 99, 28 + 37 + 101, 28 + 54 + 55, 28 + 54 + 59, 28 +
54 + 60, 28 + 54 + 95, 28 + 54 + 99, 28 + 54 + 101, 28 + 55 + 59, 28 + 55 + 60, 28 + 55 +
95, 28 + 55 + 99, 28 + 55 + 101, 28 + 59 + 60, 28 + 59 + 95, 28 + 59 + 99, 28 + 59 + 101,
28 + 60 + 95, 28 + 60 + 99, 28 + 60 + 101, 28 + 95 + 99, 28 + 95 + 101, 28 + 99 + 101, 29 +
30 + 31, 29 + 30 + 32, 29 + 30 + 34, 29 + 30 + 35, 29 + 30 + 36, 29 + 30 + 37, 29 + 30 +
54, 29 + 30 + 55, 29 + 30 + 59, 29 + 30 + 60, 29 + 30 + 95, 29 + 30 + 99, 29 + 30 + 101,
29 + 31 + 32, 29 + 31 + 34, 29 + 31 + 35, 29 + 31 + 36, 29 + 31 + 37, 29 + 31 + 54, 29 +
31 + 55, 29 + 31 + 59, 29 + 31 + 60, 29 + 31 + 95, 29 + 31 + 99, 29 + 31 + 101, 29 + 32 +
34, 29 + 32 + 35, 29 + 32 + 36, 29 + 32 + 37, 29 + 32 + 54, 29 + 32 + 55, 29 + 32 + 59, 29 +
32 + 60, 29 + 32 + 95, 29 + 32 + 99, 29 + 32 + 101, 29 + 34 + 35, 29 + 34 + 36, 29 + 34 +
37, 29 + 34 + 54, 29 + 34 + 55, 29 + 34 + 59, 29 + 34 + 60, 29 + 34 + 95, 29 + 34 + 99,
29 + 34 + 101, 29 + 35 + 36, 29 + 35 + 37, 29 + 35 + 54, 29 + 35 + 55, 29 + 35 + 59, 29 +
35 + 60, 29 + 35 + 95, 29 + 35 + 99, 29 + 35 + 101, 29 + 36 + 37, 29 + 36 + 54, 29 + 36 +
55, 29 + 36 + 59, 29 + 36 + 60, 29 + 36 + 95, 29 + 36 + 99, 29 + 36 + 101, 29 + 37 + 54,
29 + 37 + 55, 29 + 37 + 59, 29 + 37 + 60, 29 + 37 + 95, 29 + 37 + 99, 29 + 37 + 101, 29 +
54 + 55, 29 + 54 + 59, 29 + 54 + 60, 29 + 54 + 95, 29 + 54 + 99, 29 + 54 + 101, 29 + 55 +
59, 29 + 55 + 60, 29 + 55 + 95, 29 + 55 + 99, 29 + 55 + 101, 29 + 59 + 60, 29 + 59 + 95,
29 + 59 + 99, 29 + 59 + 101, 29 + 60 + 95, 29 + 60 + 99, 29 + 60 + 101, 29 + 95 + 99, 29 +
95 + 101, 29 + 99 + 101, 30 + 31 + 32, 30 + 31 + 34, 30 + 31 + 35, 30 + 31 + 36, 30 + 31 +
37, 30 + 31 + 54, 30 + 31 + 55, 30 + 31 + 59, 30 + 31 + 60, 30 + 31 + 95, 30 + 31 + 99, 30 +
31 + 101, 30 + 32 + 34, 30 + 32 + 35, 30 + 32 + 36, 30 + 32 + 37, 30 + 32 + 54, 30 + 32 +
55, 30 + 32 + 59, 30 + 32 + 60, 30 + 32 + 95, 30 + 32 + 99, 30 + 32 + 101, 30 + 34 + 35,
30 + 34 + 36, 30 + 34 + 37, 30 + 34 + 54, 30 + 34 + 55, 30 + 34 + 59, 30 + 34 + 60, 30 +
34 + 95, 30 + 34 + 99, 30 + 34 + 101, 30 + 35 + 36, 30 + 35 + 37, 30 + 35 + 54, 30 + 35 +
55, 30 + 35 + 59, 30 + 35 + 60, 30 + 35 + 95, 30 + 35 + 99, 30 + 35 + 101, 30 + 36 + 37,
30 + 36 + 54, 30 + 36 + 55, 30 + 36 + 59, 30 + 36 + 60, 30 + 36 + 95, 30 + 36 + 99, 30 +
36 + 101, 30 + 37 + 54, 30 + 37 + 55, 30 + 37 + 59, 30 + 37 + 60, 30 + 37 + 95, 30 + 37 +
99, 30 + 37 + 101, 30 + 54 + 55, 30 + 54 + 59, 30 + 54 + 60, 30 + 54 + 95, 30 + 54 + 99,
30 + 54 + 101, 30 + 55 + 59, 30 + 55 + 60, 30 + 55 + 95, 30 + 55 + 99, 30 + 55 + 101, 30 +
59 + 60, 30 + 59 + 95, 30 + 59 + 99, 30 + 59 + 101, 30 + 60 + 95, 30 + 60 + 99, 30 + 60 +
101, 30 + 95 + 99, 30 + 95 + 101, 30 + 99 + 101, 31 + 32 + 34, 31 + 32 + 35, 31 + 32 + 36,
31 + 32 + 37, 31 + 32 + 54, 31 + 32 + 55, 31 + 32 + 59, 31 + 32 + 60, 31 + 32 + 95, 31 +
32 + 99, 31 + 32 + 101, 31 + 34 + 35, 31 + 34 + 36, 31 + 34 + 37, 31 + 34 + 54, 31 + 34 +
55, 31 + 34 + 59, 31 + 34 + 60, 31 + 34 + 95, 31 + 34 + 99, 31 + 34 + 101, 31 + 35 + 36,
31 + 35 + 37, 31 + 35 + 54, 31 + 35 + 55, 31 + 35 + 59, 31 + 35 + 60, 31 + 35 + 95, 31 +
35 + 99, 31 + 35 + 101, 31 + 36 + 37, 31 + 36 + 54, 31 + 36 + 55, 31 + 36 + 59, 31 + 36 +
60, 31 + 36 + 95, 31 + 36 + 99, 31 + 36 + 101, 31 + 37 + 54, 31 + 37 + 55, 31 + 37 + 59,
31 + 37 + 60, 31 + 37 + 95, 31 + 37 + 99, 31 + 37 + 101, 31 + 54 + 55, 31 + 54 + 59, 31 +
54 + 60, 31 + 54 + 95, 31 + 54 + 99, 31 + 54 + 101, 31 + 55 + 59, 31 + 55 + 60, 31 + 55 +
95, 31 + 55 + 99, 31 + 55 + 101, 31 + 59 + 60, 31 + 59 + 95, 31 + 59 + 99, 31 + 59 + 101,
31 + 60 + 95, 31 + 60 + 99, 31 + 60 + 101, 31 + 95 + 99, 31 + 95 + 101, 31 + 99 + 101, 32 +
34 + 35, 32 + 34 + 36, 32 + 34 + 37, 32 + 34 + 54, 32 + 34 + 55, 32 + 34 + 59, 32 + 34 +
60, 32 + 34 + 95, 32 + 34 + 99, 32 + 34 + 101, 32 + 35 + 36, 32 + 35 + 37, 32 + 35 + 54,
32 + 35 + 55, 32 + 35 + 59, 32 + 35 + 60, 32 + 35 + 95, 32 + 35 + 99, 32 + 35 + 101, 32 +
36 + 37, 32 + 36 + 54, 32 + 36 + 55, 32 + 36 + 59, 32 + 36 + 60, 32 + 36 + 95, 32 + 36 +
99, 32 + 36 + 101, 32 + 37 + 54, 32 + 37 + 55, 32 + 37 + 59, 32 + 37 + 60, 32 + 37 + 95,
32 + 37 + 99, 32 + 37 + 101, 32 + 54 + 55, 32 + 54 + 59, 32 + 54 + 60, 32 + 54 + 95, 32 +
54 + 99, 32 + 54 + 101, 32 + 55 + 59, 32 + 55 + 60, 32 + 55 + 95, 32 + 55 + 99, 32 + 55 +
101, 32 + 59 + 60, 32 + 59 + 95, 32 + 59 + 99, 32 + 59 + 101, 32 + 60 + 95, 32 + 60 + 99,
32 + 60 + 101, 32 + 95 + 99, 32 + 95 + 101, 32 + 99 + 101, 34 + 35 + 36, 34 + 35 + 37, 34 +
35 + 54, 34 + 35 + 55, 34 + 35 + 59, 34 + 35 + 60, 34 + 35 + 95, 34 + 35 + 99, 34 + 35 +
101, 34 + 36 + 37, 34 + 36 + 54, 34 + 36 + 55, 34 + 36 + 59, 34 + 36 + 60, 34 + 36 + 95,
34 + 36 + 99, 34 + 36 + 101, 34 + 37 + 54, 34 + 37 + 55, 34 + 37 + 59, 34 + 37 + 60, 34 +
37 + 95, 34 + 37 + 99, 34 + 37 + 101, 34 + 54 + 55, 34 + 54 + 59, 34 + 54 + 60, 34 + 54 +
95, 34 + 54 + 99, 34 + 54 + 101, 34 + 55 + 59, 34 + 55 + 60, 34 + 55 + 95, 34 + 55 + 99,
34 + 55 + 101, 34 + 59 + 60, 34 + 59 + 95, 34 + 59 + 99, 34 + 59 + 101, 34 + 60 + 95, 34 +
60 + 99, 34 + 60 + 101, 34 + 95 + 99, 34 + 95 + 101, 34 + 99 + 101, 35 + 36 + 37, 35 + 36 +
54, 35 + 36 + 55, 35 + 36 + 59, 35 + 36 + 60, 35 + 36 + 95, 35 + 36 + 99, 35 + 36 + 101,
35 + 37 + 54, 35 + 37 + 55, 35 + 37 + 59, 35 + 37 + 60, 35 + 37 + 95, 35 + 37 + 99, 35 +
37 + 101, 35 + 54 + 55, 35 + 54 + 59, 35 + 54 + 60, 35 + 54 + 95, 35 + 54 + 99, 35 + 54 +
101, 35 + 55 + 59, 35 + 55 + 60, 35 + 55 + 95, 35 + 55 + 99, 35 + 55 + 101, 35 + 59 + 60,
35 + 59 + 95, 35 + 59 + 99, 35 + 59 + 101, 35 + 60 + 95, 35 + 60 + 99, 35 + 60 + 101, 35 +
95 + 99, 35 + 95 + 101, 35 + 99 + 101, 36 + 37 + 54, 36 + 37 + 55, 36 + 37 + 59, 36 + 37 +
60, 36 + 37 + 95, 36 + 37 + 99, 36 + 37 + 101, 36 + 54 + 55, 36 + 54 + 59, 36 + 54 + 60,
36 + 54 + 95, 36 + 54 + 99, 36 + 54 + 101, 36 + 55 + 59, 36 + 55 + 60, 36 + 55 + 95, 36 +
55 + 99, 36 + 55 + 101, 36 + 59 + 60, 36 + 59 + 95, 36 + 59 + 99, 36 + 59 + 101, 36 + 60 +
95, 36 + 60 + 99, 36 + 60 + 101, 36 + 95 + 99, 36 + 95 + 101, 36 + 99 + 101, 37 + 54 + 55,
37 + 54 + 59, 37 + 54 + 60, 37 + 54 + 95, 37 + 54 + 99, 37 + 54 + 101, 37 + 55 + 59, 37 +
55 + 60, 37 + 55 + 95, 37 + 55 + 99, 37 + 55 + 101, 37 + 59 + 60, 37 + 59 + 95, 37 + 59 +
99, 37 + 59 + 101, 37 + 60 + 95, 37 + 60 + 99, 37 + 60 + 101, 37 + 95 + 99, 37 + 95 + 101,
37 + 99 + 101, 54 + 55 + 59, 54 + 55 + 60, 54 + 55 + 95, 54 + 55 + 99, 54 + 55 + 101, 54 +
59 + 60, 54 + 59 + 95, 54 + 59 + 99, 54 + 59 + 101, 54 + 60 + 95, 54 + 60 + 99, 54 + 60 +
101, 54 + 95 + 99, 54 + 95 + 101, 54 + 99 + 101, 55 + 59 + 60, 55 + 59 + 95, 55 + 59 + 99,
55 + 59 + 101, 55 + 60 + 95, 55 + 60 + 99, 55 + 60 + 101, 55 + 95 + 99, 55 + 95 + 101, 55 +
99 + 101, 59 + 60 + 95, 59 + 60 + 99, 59 + 60 + 101, 59 + 95 + 99, 59 + 95 + 101, 59 +
99 + 101, 60 + 95 + 99, 60 + 95 + 101, 60 + 99 + 101, 95 + 99 + 101

[0167] In some examples of any of the ABPCs described herein, the first antigen-binding domain includes a heavy chain variable domain that is at least 90% (e.g., at least 92%, at least 94%, at least 96%, at least 98%, at least 99%, or 100%) identical to SEQ ID NO: 1, where the heavy chain variable domain includes a histidine at any of the specific combinations of one or more amino acid positions in SEQ ID NO: 1 listed in Table 1; and a light chain variable domain that that is at least 90% (e.g., at least 92%, at least 94%, at least 96%, at least 98%, at least 99%, or 100%) identical to SEQ ID NO: 2, where the light chain variable domain includes a histidine at any of the specific combinations of one or more amino acid positions in SEQ ID NO: 2 listed in Table 2.

[0168] In some examples of any of the ABPCs described herein, the first antigen-binding domain comprises a light chain variable domain comprising SEQ ID NO: 2, and a heavy chain variable domain that is at least 90% identical (e.g., at least 92%, at least 94%, at least 96%, at least 98%, at least 99%, or 100%) identical to SEQ ID NO: 1, where the heavy chain variable domain includes a histidine at any of the specific combinations of one or more (e.g., two, three, four, five, six, seven, eight, nine, or ten) amino acid positions in SEQ ID NO: 1 listed in Table 1.

[0169] In some examples of any of the ABPCs described herein, the first antigen-binding domain comprises a light chain variable domain that is at least 90% identical to SEQ ID NO: 2, wherein the light chain variable domain includes a histidine at position 25 in SEQ ID NO: 2; and a heavy chain variable domain that is at least 90% (e.g., at least 92%, at least 94%, at least 96%, at least 98%, at least 99%, or 100%) identical to SEQ ID NO: 1, where the heavy chain variable domain includes a histidine at any of the specific combinations of one or more amino acid positions in SEQ ID NO: 1 listed in Table 1.

[0170] In some examples of any of the ABPCs described herein, the first antigen-binding domain comprises a light chain variable domain that is at least 90% identical to SEQ ID NO: 2, wherein the light chain variable domain includes a histidine at position 28 in SEQ ID NO: 2; and a heavy chain variable domain that is at least 90% (e.g., at least 92%, at least 94%, at least 96%, at least 98%, at least 99%, or 100%) identical to SEQ ID NO: 1, where the heavy chain variable domain includes a histidine at any of the specific combinations of one or more amino acid positions in SEQ ID NO: 1 listed in Table 1.

[0171] In some examples of any of the ABPCs described herein, the first antigen-binding domain comprises a light chain variable domain that is at least 90% identical to SEQ ID NO: 2, wherein the light chain variable domain includes a histidine at position 29 in SEQ ID NO: 2; and a heavy chain variable domain that is at least 90% (e.g., at least 92%, at least 94%, at least 96%, at least 98%, at least 99%, or 100%) identical to SEQ ID NO: 1, where the heavy chain variable domain includes a histidine at any of the specific combinations of one or more amino acid positions in SEQ ID NO: 1 listed in Table 1.

[0172] In some examples of any of the ABPCs described herein, the first antigen-binding domain comprises a light chain variable domain that is at least 90% identical to SEQ ID NO: 2, wherein the light chain variable domain includes a histidine at position 30 in SEQ ID NO: 2; and a heavy chain variable domain that is at least 90% (e.g., at least 92%, at least 94%, at least 96%, at least 98%, at least 99%, or 100%) identical to SEQ ID NO: 1, where the heavy chain variable domain includes a histidine at any of the specific combinations of one or more amino acid positions in SEQ ID NO: 1 listed in Table 1.

[0173] In some examples of any of the ABPCs described herein, the first antigen-binding domain comprises a light chain variable domain that is at least 90% identical to SEQ ID NO: 2, wherein the light chain variable domain includes a histidine at position 31 in SEQ ID NO: 2; and a heavy chain variable domain that is at least 90% (e.g., at least 92%, at least 94%, at least 96%, at least 98%, at least 99%, or 100%) identical to SEQ ID NO: 1, where the heavy chain variable domain includes a histidine at any of the specific combinations of one or more amino acid positions in SEQ ID NO: 1 listed in Table 1.

[0174] In some examples of any of the ABPCs described herein, the first antigen-binding domain comprises a light chain variable domain that is at least 90% identical to SEQ ID NO: 2, wherein the light chain variable domain includes a histidine at position 32 in SEQ ID NO: 2; and a heavy chain variable domain that is at least 90% (e.g., at least 92%, at least 94%, at least 96%, at least 98%, at least 99%, or 100%) identical to SEQ ID NO: 1, where the heavy chain variable domain includes a histidine at any of the specific combinations of one or more amino acid positions in SEQ ID NO: 1 listed in Table 1.

[0175] In some examples of any of the ABPCs described herein, the first antigen-binding domain comprises a light chain variable domain that is at least 90% identical to SEQ ID NO: 2, wherein the light chain variable domain includes a histidine at position 34 in SEQ ID NO: 2; and a heavy chain variable domain that is at least 90% (e.g., at least 92%, at least 94%, at least 96%, at least 98%, at least 99%, or 100%) identical to SEQ ID NO: 1, where the heavy chain variable domain includes a histidine at any of the specific combinations of one or more amino acid positions in SEQ ID NO: 1 listed in Table 1.

[0176] In some examples of any of the ABPCs described herein, the first antigen-binding domain comprises a light chain variable domain that is at least 90% identical to SEQ ID NO: 2, wherein the light chain variable domain includes a histidine at position 35 in SEQ ID NO: 2; and a heavy chain variable domain that is at least 90% (e.g., at least 92%, at least 94%, at least 96%, at least 98%, at least 99%, or 100%) identical to SEQ ID NO: 1, where the heavy chain variable domain includes a histidine at any of the specific combinations of one or more amino acid positions in SEQ ID NO: 1 listed in Table 1.

[0177] In some examples of any of the ABPCs described herein, the first antigen-binding domain comprises a light chain variable domain that is at least 90% identical to SEQ ID NO: 2, wherein the light chain variable domain includes a histidine at position 36 in SEQ ID NO: 2; and a heavy chain variable domain that is at least 90% (e.g., at least 92%, at least 94%, at least 96%, at least 98%, at least 99%, or 100%) identical to SEQ ID NO: 1, where the heavy chain variable domain includes a histidine at any of the specific combinations of one or more amino acid positions in SEQ ID NO: 1 listed in Table 1.

[0178] In some examples of any of the ABPCs described herein, the first antigen-binding domain comprises a light chain variable domain that is at least 90% identical to SEQ ID NO: 2, wherein the light chain variable domain includes a histidine at position 37 in SEQ ID NO: 2; and a heavy chain variable domain that is at least 90% (e.g., at least 92%, at least 94%, at least 96%, at least 98%, at least 99%, or 100%) identical to SEQ ID NO: 1, where the heavy chain variable domain includes a histidine at any of the specific combinations of one or more amino acid positions in SEQ ID NO: 1 listed in Table 1.

[0179] In some examples of any of the ABPCs described herein, the first antigen-binding domain comprises a light chain variable domain that is at least 90% identical to SEQ ID NO: 2, wherein the light chain variable domain includes a histidine at position 54 in SEQ ID NO: 2; and a heavy chain variable domain that is at least 90% (e.g., at least 92%, at least 94%, at least 96%, at least 98%, at least 99%, or 100%) identical to SEQ ID NO: 1, where the heavy chain variable domain includes a histidine at any of the specific combinations of one or more amino acid positions in SEQ ID NO: 1 listed in Table 1.

[0180] In some examples of any of the ABPCs described herein, the first antigen-binding domain comprises a light chain variable domain that is at least 90% identical to SEQ ID NO: 2, wherein the light chain variable domain includes a histidine at position 55 in SEQ ID NO: 2; and a heavy chain variable domain that is at least 90% (e.g., at least 92%, at least 94%, at least 96%, at least 98%, at least 99%, or 100%) identical to SEQ ID NO: 1, where the heavy chain variable domain includes a histidine at any of the specific combinations of one or more amino acid positions in SEQ ID NO: 1 listed in Table 1.

[0181] In some examples of any of the ABPCs described herein, the first antigen-binding domain comprises a light chain variable domain that is at least 90% identical to SEQ ID NO: 2, wherein the light chain variable domain includes a histidine at position 59 in SEQ ID NO: 2; and a heavy chain variable domain that is at least 90% (e.g., at least 92%, at least 94%, at least 96%, at least 98%, at least 99%, or 100%) identical to SEQ ID NO: 1, where the heavy chain variable domain includes a histidine at any of the specific combinations of one or more amino acid positions in SEQ ID NO: 1 listed in Table 1.

[0182] In some examples of any of the ABPCs described herein, the first antigen-binding domain comprises a light chain variable domain that is at least 90% identical to SEQ ID NO: 2, wherein the light chain variable domain includes a histidine at position 60 in SEQ ID NO: 2; and a heavy chain variable domain that is at least 90% (e.g., at least 92%, at least 94%, at least 96%, at least 98%, at least 99%, or 100%) identical to SEQ ID NO: 1, where the heavy chain variable domain includes a histidine at any of the specific combinations of one or more amino acid positions in SEQ ID NO: 1 listed in Table 1.

[0183] In some examples of any of the ABPCs described herein, the first antigen-binding domain comprises a light chain variable domain that is at least 90% identical to SEQ ID NO: 2, wherein the light chain variable domain includes a histidine at position 95 in SEQ ID NO: 2; and a heavy chain variable domain that is at least 90% (e.g., at least 92%, at least 94%, at least 96%, at least 98%, at least 99%, or 100%) identical to SEQ ID NO: 1, where the heavy chain variable domain includes a histidine at any of the specific combinations of one or more amino acid positions in SEQ ID NO: 1 listed in Table 1.

[0184] In some examples of any of the ABPCs described herein, the first antigen-binding domain comprises a light chain variable domain that is at least 90% identical to SEQ ID NO: 2, wherein the light chain variable domain includes a histidine at position 99 in SEQ ID NO: 2; and a heavy chain variable domain that is at least 90% (e.g., at least 92%, at least 94%, at least 96%, at least 98%, at least 99%, or 100%) identical to SEQ ID NO: 1, where the heavy chain variable domain includes a histidine at any of the specific combinations of one or more amino acid positions in SEQ ID NO: 1 listed in Table 1.

[0185] In some examples of any of the ABPCs described herein, the first antigen-binding domain comprises a light chain variable domain that is at least 90% identical to SEQ ID NO: 2, wherein the light chain variable domain includes a histidine at position 101 in SEQ ID NO: 2; and a heavy chain variable domain that is at least 90% (e.g., at least 92%, at least 94%, at least 96%, at least 98%, at least 99%, or 100%) identical to SEQ ID NO: 1, where the heavy chain variable domain includes a histidine at any of the specific combinations of one or more amino acid positions in SEQ ID NO: 1 listed in Table 1.

[0186] In some examples of any of the ABPCs described herein, the first antigen-binding domain comprises a light chain variable domain that is at least 90% identical to SEQ ID NO: 2, wherein the light chain variable domain includes an alanine at position 38 in SEQ ID NO: 2; and a heavy chain variable domain that is at least 90% (e.g., at least 92%, at least 94%, at least 96%, at least 98%, at least 99%, or 100%) identical to SEQ ID NO: 1, where the heavy chain variable domain includes a histidine at any of the specific combinations of one or more amino acid positions in SEQ ID NO: 1 listed in Table 1.

[0187] In some examples of any of the ABPCs described herein, the first antigen-binding domain includes a heavy chain variable domain of Telisotuzumab with one or more (e.g., one, two, three, four, five, six, seven, eight, nine, ten, eleven, twelve, thirteen, fourteen, fifteen, sixteen, seventeen, eighteen, nineteen, or twenty) histidine(s) substituted with an alanine. In some examples of any of the ABPCs described herein, the first antigen-binding domain includes a light chain variable domain of Telisotuzumab with one or more (e.g., one, two, three, four, five, six, seven, eight, nine, ten, eleven, twelve, thirteen, fourteen, fifteen, sixteen, seventeen, eighteen, nineteen, or twenty) histidine(s) substituted with an alanine. In some examples of any of the ABPCs described herein, the first antigen-binding domain includes a heavy chain variable domain of Telisotuzumab with one or more (e.g., one, two, three, four, five, six, seven, eight, nine, ten, eleven, twelve, thirteen, fourteen, fifteen, sixteen, seventeen, eighteen, nineteen, or twenty) histidines substituted with an alanine; and a light chain variable domain of Telisotuzumab with one or more (e.g., one, two, three, four, five, six, seven, eight, nine, ten, eleven, twelve, thirteen, fourteen, fifteen, sixteen, seventeen, eighteen, nineteen, or twenty) histidine(s) substituted with an alanine. In some examples of any of the ABPCs described herein, the heavy chain variable domain of Telisotuzumab comprises SEQ ID NO: 1. In some examples of any of the ABPCs described herein, the light chain variable domain of Telisotuzumab comprises SEQ ID NO: 2.

[0188] In some examples of any of the ABPCs described herein, the first antigen-binding domain comprises a heavy chain variable domain comprising a CDR1, a CDR2, and a CDR3 of SEQ ID NO: 3, SEQ ID NO: 4, and SEQ ID NO: 5, respectively, with collectively a total of one or more (e.g., one, two, three, four, five, six, seven, eight, nine, or ten) histidine(s) in SEQ ID NOs: 3-5 substituted with an alanine. In some examples of any of the ABPCs described herein, the first antigen-binding domain comprises a light chain variable domain comprising a CDR1, a CDR2, and a CDR3 of SEQ ID NO: 6, SEQ ID NO: 7, and SEQ ID NO: 8, respectively, with collectively a total of one or more (e.g., one, two, three, four, five, six, seven, eight, nine, or ten) histidine(s) in SEQ ID NOs: 6-8 substituted with an alanine. In some examples of any of the ABPCs described herein, the first antigen-binding domain includes: a heavy chain variable domain comprising a CDR1, a CDR2, and a CDR3 of SEQ ID NO: 3, SEQ ID NO: 4, and SEQ ID NO: 5, respectively, with collectively a total of one or more (e.g., one, two, three, four, five, six, seven, eight, nine, or ten) histidine(s) in SEQ ID NOs: 3-5 substituted with an alanine; and a light chain variable domain comprising a CDR1, a CDR2, and a CDR3 of SEQ ID NO: 6, SEQ ID NO: 7, and SEQ ID NO: 8, respectively, with collectively a total of one or more (e.g., one, two, three, four, five, six, seven, eight, nine, or ten) histidine(s) in SEQ ID NOs: 6-8 substituted with an alanine.

[0189] In some examples of any of the ABPCs described herein, the first antigen-binding domain comprises a heavy chain variable domain of SEQ ID NO: 1, SEQ ID NO: 13, SEQ ID NO: 14, SEQ ID NO: 15, SEQ ID NO: 16, SEQ ID NO: 17, SEQ ID NO: 18, SEQ ID NO: 19, SEQ ID NO: 20, SEQ ID NO: 21, SEQ ID NO: 22, SEQ ID NO: 23, SEQ ID NO: 24, SEQ ID NO: 25, SEQ ID NO: 26, SEQ ID NO: 27, SEQ ID NO: 28, SEQ ID NO: 29, SEQ ID NO: 30, SEQ ID NO: 31, SEQ ID NO: 32, SEQ ID NO: 33, SEQ ID NO: 34, SEQ ID NO: 35, SEQ ID NO: 36, SEQ ID NO: 37, SEQ ID NO: 38, SEQ ID NO: 39, SEQ ID NO: 40, SEQ ID NO: 41, SEQ ID NO: 42, SEQ ID NO: 43, SEQ ID NO: 44, SEQ ID NO: 45, SEQ ID NO: 46, SEQ ID NO: 47, SEQ ID NO: 48, SEQ ID NO: 49, or SEQ ID NO: 50.

[0190] In some examples of any of the ABPCs described herein, the first antigen-binding domain includes a light chain variable domain of SEQ ID NO: 2, SEQ ID NO: 51, SEQ ID NO: 52, SEQ ID NO: 53, SEQ ID NO: 54, SEQ ID NO: 55, SEQ ID NO: 56, SEQ ID NO: 57, SEQ ID NO: 58, SEQ ID NO: 59, SEQ ID NO: 60, SEQ ID NO: 61, SEQ ID NO: 62, SEQ ID NO: 63, SEQ ID NO: 64, SEQ ID NO: 65, SEQ ID NO: 66, SEQ ID NO: 67, SEQ ID NO: 68, SEQ ID NO: 69, SEQ ID NO: 70, SEQ ID NO: 71, SEQ ID NO: 72, SEQ ID NO: 73, SEQ ID NO: 74, SEQ ID NO: 75, SEQ ID NO: 76, SEQ ID NO: 77, SEQ ID NO: 78, SEQ ID NO: 79, SEQ ID NO: 80, or SEQ ID NO: 81.

[0191] In some examples of any of the ABPCs described herein, the first antigen-binding domain includes a light chain variable domain comprising SEQ ID NO: 2, and a heavy chain variable domain comprising: SEQ ID NO: 13, SEQ ID NO: 14, SEQ ID NO: 15, SEQ ID NO: 16, SEQ ID NO: 17, SEQ ID NO: 18, SEQ ID NO: 19, SEQ ID NO: 20, SEQ ID NO: 21, SEQ ID NO: 22, SEQ ID NO: 23, SEQ ID NO: 24, SEQ ID NO: 25, SEQ ID NO: 26, SEQ ID NO: 27, SEQ ID NO: 28, SEQ ID NO: 29, SEQ ID NO: 30, SEQ ID NO: 31, SEQ ID NO: 32, SEQ ID NO: 33, SEQ ID NO: 34, SEQ ID NO: 35, SEQ ID NO: 36, SEQ ID NO: 37, SEQ ID NO: 38, SEQ ID NO: 39, SEQ ID NO: 40, SEQ ID NO: 41, SEQ ID NO: 42, SEQ ID NO: 43, SEQ ID NO: 44, SEQ ID NO: 45, SEQ ID NO: 46, SEQ ID NO: 47, SEQ ID NO: 48, SEQ ID NO: 49, or SEQ ID NO: 50.

[0192] In some examples of any of the ABPCs described herein, the first antigen-binding domain includes a light chain variable domain comprising SEQ ID NO: 51, and a heavy chain variable domain comprising: SEQ ID NO: 1, SEQ ID NO: 13, SEQ ID NO: 14, SEQ ID NO: 15, SEQ ID NO: 16, SEQ ID NO: 17, SEQ ID NO: 18, SEQ ID NO: 19, SEQ ID NO: 20, SEQ ID NO: 21, SEQ ID NO: 22, SEQ ID NO: 23, SEQ ID NO: 24, SEQ ID NO: 25, SEQ ID NO: 26, SEQ ID NO: 27, SEQ ID NO: 28, SEQ ID NO: 29, SEQ ID NO: 30, SEQ ID NO: 31, SEQ ID NO: 32, SEQ ID NO: 33, SEQ ID NO: 34, SEQ ID NO: 35, SEQ ID NO: 36, SEQ ID NO: 37, SEQ ID NO: 38, SEQ ID NO: 39, SEQ ID NO: 40, SEQ ID NO: 41, SEQ ID NO: 42, SEQ ID NO: 43, SEQ ID NO: 44, SEQ ID NO: 45, SEQ ID NO: 46, SEQ ID NO: 47, SEQ ID NO: 48, SEQ ID NO: 49, or SEQ ID NO: 50.

[0193] In some examples of any of the ABPCs described herein, the first antigen-binding domain includes a light chain variable domain comprising SEQ ID NO: 52, and a heavy chain variable domain comprising: SEQ ID NO: 1, SEQ ID NO: 13, SEQ ID NO: 14, SEQ ID NO: 15, SEQ ID NO: 16, SEQ ID NO: 17, SEQ ID NO: 18, SEQ ID NO: 19, SEQ ID NO: 20, SEQ ID NO: 21, SEQ ID NO: 22, SEQ ID NO: 23, SEQ ID NO: 24, SEQ ID NO: 25, SEQ ID NO: 26, SEQ ID NO: 27, SEQ ID NO: 28, SEQ ID NO: 29, SEQ ID NO: 30, SEQ ID NO: 31, SEQ ID NO: 32, SEQ ID NO: 33, SEQ ID NO: 34, SEQ ID NO: 35, SEQ ID NO: 36, SEQ ID NO: 37, SEQ ID NO: 38, SEQ ID NO: 39, SEQ ID NO: 40, SEQ ID NO: 41, SEQ ID NO: 42, SEQ ID NO: 43, SEQ ID NO: 44, SEQ ID NO: 45, SEQ ID NO: 46, SEQ ID NO: 47, SEQ ID NO: 48, SEQ ID NO: 49, or SEQ ID NO: 50.

[0194] In some examples of any of the ABPCs described herein, the first antigen-binding domain includes a light chain variable domain comprising SEQ ID NO: 53, and a heavy chain variable domain comprising: SEQ ID NO: 1, SEQ ID NO: 13, SEQ ID NO: 14, SEQ ID NO: 15, SEQ ID NO: 16, SEQ ID NO: 17, SEQ ID NO: 18, SEQ ID NO: 19, SEQ ID NO: 20, SEQ ID NO: 21, SEQ ID NO: 22, SEQ ID NO: 23, SEQ ID NO: 24, SEQ ID NO: 25, SEQ ID NO: 26, SEQ ID NO: 27, SEQ ID NO: 28, SEQ ID NO: 29, SEQ ID NO: 30, SEQ ID NO: 31, SEQ ID NO: 32, SEQ ID NO: 33, SEQ ID NO: 34, SEQ ID NO: 35, SEQ ID NO: 36, SEQ ID NO: 37, SEQ ID NO: 38, SEQ ID NO: 39, SEQ ID NO: 40, SEQ ID NO: 41, SEQ ID NO: 42, SEQ ID NO: 43, SEQ ID NO: 44, SEQ ID NO: 45, SEQ ID NO: 46, SEQ ID NO: 47, SEQ ID NO: 48, SEQ ID NO: 49, or SEQ ID NO: 50.

[0195] In some examples of any of the ABPCs described herein, the first antigen-binding domain includes a light chain variable domain comprising SEQ ID NO: 54, and a heavy chain variable domain comprising: SEQ ID NO: 1, SEQ ID NO: 13, SEQ ID NO: 14, SEQ ID NO: 15, SEQ ID NO: 16, SEQ ID NO: 17, SEQ ID NO: 18, SEQ ID NO: 19, SEQ ID NO: 20, SEQ ID NO: 21, SEQ ID NO: 22, SEQ ID NO: 23, SEQ ID NO: 24, SEQ ID NO: 25, SEQ ID NO: 26, SEQ ID NO: 27, SEQ ID NO: 28, SEQ ID NO: 29, SEQ ID NO: 30, SEQ ID NO: 31, SEQ ID NO: 32, SEQ ID NO: 33, SEQ ID NO: 34, SEQ ID NO: 35, SEQ ID NO: 36, SEQ ID NO: 37, SEQ ID NO: 38, SEQ ID NO: 39, SEQ ID NO: 40, SEQ ID NO: 41, SEQ ID NO: 42, SEQ ID NO: 43, SEQ ID NO: 44, SEQ ID NO: 45, SEQ ID NO: 46, SEQ ID NO: 47, SEQ ID NO: 48, SEQ ID NO: 49, or SEQ ID NO: 50.

[0196] In some examples of any of the ABPCs described herein, the first antigen-binding domain includes a light chain variable domain comprising SEQ ID NO: 55, and a heavy chain variable domain comprising: SEQ ID NO: 1, SEQ ID NO: 13, SEQ ID NO: 14, SEQ ID NO: 15, SEQ ID NO: 16, SEQ ID NO: 17, SEQ ID NO: 18, SEQ ID NO: 19, SEQ ID NO: 20, SEQ ID NO: 21, SEQ ID NO: 22, SEQ ID NO: 23, SEQ ID NO: 24, SEQ ID NO: 25, SEQ ID NO: 26, SEQ ID NO: 27, SEQ ID NO: 28, SEQ ID NO: 29, SEQ ID NO: 30, SEQ ID NO: 31, SEQ ID NO: 32, SEQ ID NO: 33, SEQ ID NO: 34, SEQ ID NO: 35, SEQ ID NO: 36, SEQ ID NO: 37, SEQ ID NO: 38, SEQ ID NO: 39, SEQ ID NO: 40, SEQ ID NO: 41, SEQ ID NO: 42, SEQ ID NO: 43, SEQ ID NO: 44, SEQ ID NO: 45, SEQ ID NO: 46, SEQ ID NO: 47, SEQ ID NO: 48, SEQ ID NO: 49, or SEQ ID NO: 50.

[0197] In some examples of any of the ABPCs described herein, the first antigen-binding domain includes a light chain variable domain comprising SEQ ID NO: 56, and a heavy chain variable domain comprising: SEQ ID NO: 1, SEQ ID NO: 13, SEQ ID NO: 14, SEQ ID NO: 15, SEQ ID NO: 16, SEQ ID NO: 17, SEQ ID NO: 18, SEQ ID NO: 19, SEQ ID NO: 20, SEQ ID NO: 21, SEQ ID NO: 22, SEQ ID NO: 23, SEQ ID NO: 24, SEQ ID NO: 25, SEQ ID NO: 26, SEQ ID NO: 27, SEQ ID NO: 28, SEQ ID NO: 29, SEQ ID NO: 30, SEQ ID NO: 31, SEQ ID NO: 32, SEQ ID NO: 33, SEQ ID NO: 34, SEQ ID NO: 35, SEQ ID NO: 36, SEQ ID NO: 37, SEQ ID NO: 38, SEQ ID NO: 39, SEQ ID NO: 40, SEQ ID NO: 41, SEQ ID NO: 42, SEQ ID NO: 43, SEQ ID NO: 44, SEQ ID NO: 45, SEQ ID NO: 46, SEQ ID NO: 47, SEQ ID NO: 48, SEQ ID NO: 49, or SEQ ID NO: 50.

[0198] In some examples of any of the ABPCs described herein, the first antigen-binding domain includes a light chain variable domain comprising SEQ ID NO: 57, and a heavy chain variable domain comprising: SEQ ID NO: 1, SEQ ID NO: 13, SEQ ID NO: 14, SEQ ID NO: 15, SEQ ID NO: 16, SEQ ID NO: 17, SEQ ID NO: 18, SEQ ID NO: 19, SEQ ID NO: 20, SEQ ID NO: 21, SEQ ID NO: 22, SEQ ID NO: 23, SEQ ID NO: 24, SEQ ID NO: 25, SEQ ID NO: 26, SEQ ID NO: 27, SEQ ID NO: 28, SEQ ID NO: 29, SEQ ID NO: 30, SEQ ID NO: 31, SEQ ID NO: 32, SEQ ID NO: 33, SEQ ID NO: 34, SEQ ID NO: 35, SEQ ID NO: 36, SEQ ID NO: 37, SEQ ID NO: 38, SEQ ID NO: 39, SEQ ID NO: 40, SEQ ID NO: 41, SEQ ID NO: 42, SEQ ID NO: 43, SEQ ID NO: 44, SEQ ID NO: 45, SEQ ID NO: 46, SEQ ID NO: 47, SEQ ID NO: 48, SEQ ID NO: 49, or SEQ ID NO: 50.

[0199] In some examples of any of the ABPCs described herein, the first antigen-binding domain includes a light chain variable domain comprising SEQ ID NO: 58, and a heavy chain variable domain comprising: SEQ ID NO: 1, SEQ ID NO: 13, SEQ ID NO: 14, SEQ ID NO: 15, SEQ ID NO: 16, SEQ ID NO: 17, SEQ ID NO: 18, SEQ ID NO: 19, SEQ ID NO: 20, SEQ ID NO: 21, SEQ ID NO: 22, SEQ ID NO: 23, SEQ ID NO: 24, SEQ ID NO: 25, SEQ ID NO: 26, SEQ ID NO: 27, SEQ ID NO: 28, SEQ ID NO: 29, SEQ ID NO: 30, SEQ ID NO: 31, SEQ ID NO: 32, SEQ ID NO: 33, SEQ ID NO: 34, SEQ ID NO: 35, SEQ ID NO: 36, SEQ ID NO: 37, SEQ ID NO: 38, SEQ ID NO: 39, SEQ ID NO: 40, SEQ ID NO: 41, SEQ ID NO: 42, SEQ ID NO: 43, SEQ ID NO: 44, SEQ ID NO: 45, SEQ ID NO: 46, SEQ ID NO: 47, SEQ ID NO: 48, SEQ ID NO: 49, or SEQ ID NO: 50.

[0200] In some examples of any of the ABPCs described herein, the first antigen-binding domain includes a light chain variable domain comprising SEQ ID NO: 59, and a heavy chain variable domain comprising: SEQ ID NO: 1, SEQ ID NO: 13, SEQ ID NO: 14, SEQ ID NO: 15, SEQ ID NO: 16, SEQ ID NO: 17, SEQ ID NO: 18, SEQ ID NO: 19, SEQ ID NO: 20, SEQ ID NO: 21, SEQ ID NO: 22, SEQ ID NO: 23, SEQ ID NO: 24, SEQ ID NO: 25, SEQ ID NO: 26, SEQ ID NO: 27, SEQ ID NO: 28, SEQ ID NO: 29, SEQ ID NO: 30, SEQ ID NO: 31, SEQ ID NO: 32, SEQ ID NO: 33, SEQ ID NO: 34, SEQ ID NO: 35, SEQ ID NO: 36, SEQ ID NO: 37, SEQ ID NO: 38, SEQ ID NO: 39, SEQ ID NO: 40, SEQ ID NO: 41, SEQ ID NO: 42, SEQ ID NO: 43, SEQ ID NO: 44, SEQ ID NO: 45, SEQ ID NO: 46, SEQ ID NO: 47, SEQ ID NO: 48, SEQ ID NO: 49, or SEQ ID NO: 50.

[0201] In some examples of any of the ABPCs described herein, the first antigen-binding domain includes a light chain variable domain comprising SEQ ID NO: 60, and a heavy chain variable domain comprising: SEQ ID NO: 1, SEQ ID NO: 13, SEQ ID NO: 14, SEQ ID NO: 15, SEQ ID NO: 16, SEQ ID NO: 17, SEQ ID NO: 18, SEQ ID NO: 19, SEQ ID NO: 20, SEQ ID NO: 21, SEQ ID NO: 22, SEQ ID NO: 23, SEQ ID NO: 24, SEQ ID NO: 25, SEQ ID NO: 26, SEQ ID NO: 27, SEQ ID NO: 28, SEQ ID NO: 29, SEQ ID NO: 30, SEQ ID NO: 31, SEQ ID NO: 32, SEQ ID NO: 33, SEQ ID NO: 34, SEQ ID NO: 35, SEQ ID NO: 36, SEQ ID NO: 37, SEQ ID NO: 38, SEQ ID NO: 39, SEQ ID NO: 40, SEQ ID NO: 41, SEQ ID NO: 42, SEQ ID NO: 43, SEQ ID NO: 44, SEQ ID NO: 45, SEQ ID NO: 46, SEQ ID NO: 47, SEQ ID NO: 48, SEQ ID NO: 49, or SEQ ID NO: 50.

[0202] In some examples of any of the ABPCs described herein, the first antigen-binding domain includes a light chain variable domain comprising SEQ ID NO: 61, and a heavy chain variable domain comprising: SEQ ID NO: 1, SEQ ID NO: 13, SEQ ID NO: 14, SEQ ID NO: 15, SEQ ID NO: 16, SEQ ID NO: 17, SEQ ID NO: 18, SEQ ID NO: 19, SEQ ID NO: 20, SEQ ID NO: 21, SEQ ID NO: 22, SEQ ID NO: 23, SEQ ID NO: 24, SEQ ID NO: 25, SEQ ID NO: 26, SEQ ID NO: 27, SEQ ID NO: 28, SEQ ID NO: 29, SEQ ID NO: 30, SEQ ID NO: 31, SEQ ID NO: 32, SEQ ID NO: 33, SEQ ID NO: 34, SEQ ID NO: 35, SEQ ID NO: 36, SEQ ID NO: 37, SEQ ID NO: 38, SEQ ID NO: 39, SEQ ID NO: 40, SEQ ID NO: 41, SEQ ID NO: 42, SEQ ID NO: 43, SEQ ID NO: 44, SEQ ID NO: 45, SEQ ID NO: 46, SEQ ID NO: 47, SEQ ID NO: 48, SEQ ID NO: 49, or SEQ ID NO: 50.

[0203] In some examples of any of the ABPCs described herein, the first antigen-binding domain includes a light chain variable domain comprising SEQ ID NO: 62, and a heavy chain variable domain comprising: SEQ ID NO: 1, SEQ ID NO: 13, SEQ ID NO: 14, SEQ ID NO: 15, SEQ ID NO: 16, SEQ ID NO: 17, SEQ ID NO: 18, SEQ ID NO: 19, SEQ ID NO: 20, SEQ ID NO: 21, SEQ ID NO: 22, SEQ ID NO: 23, SEQ ID NO: 24, SEQ ID NO: 25, SEQ ID NO: 26, SEQ ID NO: 27, SEQ ID NO: 28, SEQ ID NO: 29, SEQ ID NO: 30, SEQ ID NO: 31, SEQ ID NO: 32, SEQ ID NO: 33, SEQ ID NO: 34, SEQ ID NO: 35, SEQ ID NO: 36, SEQ ID NO: 37, SEQ ID NO: 38, SEQ ID NO: 39, SEQ ID NO: 40, SEQ ID NO: 41, SEQ ID NO: 42, SEQ ID NO: 43, SEQ ID NO: 44, SEQ ID NO: 45, SEQ ID NO: 46, SEQ ID NO: 47, SEQ ID NO: 48, SEQ ID NO: 49, or SEQ ID NO: 50.

[0204] In some examples of any of the ABPCs described herein, the first antigen-binding domain includes a light chain variable domain comprising SEQ ID NO: 63, and a heavy chain variable domain comprising: SEQ ID NO: 1, SEQ ID NO: 13, SEQ ID NO: 14, SEQ ID NO: 15, SEQ ID NO: 16, SEQ ID NO: 17, SEQ ID NO: 18, SEQ ID NO: 19, SEQ ID NO: 20, SEQ ID NO: 21, SEQ ID NO: 22, SEQ ID NO: 23, SEQ ID NO: 24, SEQ ID NO: 25, SEQ ID NO: 26, SEQ ID NO: 27, SEQ ID NO: 28, SEQ ID NO: 29, SEQ ID NO: 30, SEQ ID NO: 31, SEQ ID NO: 32, SEQ ID NO: 33, SEQ ID NO: 34, SEQ ID NO: 35, SEQ ID NO: 36, SEQ ID NO: 37, SEQ ID NO: 38, SEQ ID NO: 39, SEQ ID NO: 40, SEQ ID NO: 41, SEQ ID NO: 42, SEQ ID NO: 43, SEQ ID NO: 44, SEQ ID NO: 45, SEQ ID NO: 46, SEQ ID NO: 47, SEQ ID NO: 48, SEQ ID NO: 49, or SEQ ID NO: 50.

[0205] In some examples of any of the ABPCs described herein, the first antigen-binding domain includes a light chain variable domain comprising SEQ ID NO: 64, and a heavy chain variable domain comprising: SEQ ID NO: 1, SEQ ID NO: 13, SEQ ID NO: 14, SEQ ID NO: 15, SEQ ID NO: 16, SEQ ID NO: 17, SEQ ID NO: 18, SEQ ID NO: 19, SEQ ID NO: 20, SEQ ID NO: 21, SEQ ID NO: 22, SEQ ID NO: 23, SEQ ID NO: 24, SEQ ID NO: 25, SEQ ID NO: 26, SEQ ID NO: 27, SEQ ID NO: 28, SEQ ID NO: 29, SEQ ID NO: 30, SEQ ID NO: 31, SEQ ID NO: 32, SEQ ID NO: 33, SEQ ID NO: 34, SEQ ID NO: 35, SEQ ID NO: 36, SEQ ID NO: 37, SEQ ID NO: 38, SEQ ID NO: 39, SEQ ID NO: 40, SEQ ID NO: 41, SEQ ID NO: 42, SEQ ID NO: 43, SEQ ID NO: 44, SEQ ID NO: 45, SEQ ID NO: 46, SEQ ID NO: 47, SEQ ID NO: 48, SEQ ID NO: 49, or SEQ ID NO: 50.

[0206] In some examples of any of the ABPCs described herein, the first antigen-binding domain includes a light chain variable domain comprising SEQ ID NO: 65, and a heavy chain variable domain comprising: SEQ ID NO: 1, SEQ ID NO: 13, SEQ ID NO: 14, SEQ ID NO: 15, SEQ ID NO: 16, SEQ ID NO: 17, SEQ ID NO: 18, SEQ ID NO: 19, SEQ ID NO: 20, SEQ ID NO: 21, SEQ ID NO: 22, SEQ ID NO: 23, SEQ ID NO: 24, SEQ ID NO: 25, SEQ ID NO: 26, SEQ ID NO: 27, SEQ ID NO: 28, SEQ ID NO: 29, SEQ ID NO: 30, SEQ ID NO: 31, SEQ ID NO: 32, SEQ ID NO: 33, SEQ ID NO: 34, SEQ ID NO: 35, SEQ ID NO: 36, SEQ ID NO: 37, SEQ ID NO: 38, SEQ ID NO: 39, SEQ ID NO: 40, SEQ ID NO: 41, SEQ ID NO: 42, SEQ ID NO: 43, SEQ ID NO: 44, SEQ ID NO: 45, SEQ ID NO: 46, SEQ ID NO: 47, SEQ ID NO: 48, SEQ ID NO: 49, or SEQ ID NO: 50.

[0207] In some examples of any of the ABPCs described herein, the first antigen-binding domain includes a light chain variable domain comprising SEQ ID NO: 66, and a heavy chain variable domain comprising: SEQ ID NO: 1, SEQ ID NO: 13, SEQ ID NO: 14, SEQ ID NO: 15, SEQ ID NO: 16, SEQ ID NO: 17, SEQ ID NO: 18, SEQ ID NO: 19, SEQ ID NO: 20, SEQ ID NO: 21, SEQ ID NO: 22, SEQ ID NO: 23, SEQ ID NO: 24, SEQ ID NO: 25, SEQ ID NO: 26, SEQ ID NO: 27, SEQ ID NO: 28, SEQ ID NO: 29, SEQ ID NO: 30, SEQ ID NO: 31, SEQ ID NO: 32, SEQ ID NO: 33, SEQ ID NO: 34, SEQ ID NO: 35, SEQ ID NO: 36, SEQ ID NO: 37, SEQ ID NO: 38, SEQ ID NO: 39, SEQ ID NO: 40, SEQ ID NO: 41, SEQ ID NO: 42, SEQ ID NO: 43, SEQ ID NO: 44, SEQ ID NO: 45, SEQ ID NO: 46, SEQ ID NO: 47, SEQ ID NO: 48, SEQ ID NO: 49, or SEQ ID NO: 50.

[0208] In some examples of any of the ABPCs described herein, the first antigen-binding domain includes a light chain variable domain comprising SEQ ID NO: 67, and a heavy chain variable domain comprising: SEQ ID NO: 1, SEQ ID NO: 13, SEQ ID NO: 14, SEQ ID NO: 15, SEQ ID NO: 16, SEQ ID NO: 17, SEQ ID NO: 18, SEQ ID NO: 19, SEQ ID NO: 20, SEQ ID NO: 21, SEQ ID NO: 22, SEQ ID NO: 23, SEQ ID NO: 24, SEQ ID NO: 25, SEQ ID NO: 26, SEQ ID NO: 27, SEQ ID NO: 28, SEQ ID NO: 29, SEQ ID NO: 30, SEQ ID NO: 31, SEQ ID NO: 32, SEQ ID NO: 33, SEQ ID NO: 34, SEQ ID NO: 35, SEQ ID NO: 36, SEQ ID NO: 37, SEQ ID NO: 38, SEQ ID NO: 39, SEQ ID NO: 40, SEQ ID NO: 41, SEQ ID NO: 42, SEQ ID NO: 43, SEQ ID NO: 44, SEQ ID NO: 45, SEQ ID NO: 46, SEQ ID NO: 47, SEQ ID NO: 48, SEQ ID NO: 49, or SEQ ID NO: 50.

[0209] In some examples of any of the ABPCs described herein, the first antigen-binding domain includes a light chain variable domain comprising SEQ ID NO: 68, and a heavy chain variable domain comprising: SEQ ID NO: 1, SEQ ID NO: 13, SEQ ID NO: 14, SEQ ID NO: 15, SEQ ID NO: 16, SEQ ID NO: 17, SEQ ID NO: 18, SEQ ID NO: 19, SEQ ID NO: 20, SEQ ID NO: 21, SEQ ID NO: 22, SEQ ID NO: 23, SEQ ID NO: 24, SEQ ID NO: 25, SEQ ID NO: 26, SEQ ID NO: 27, SEQ ID NO: 28, SEQ ID NO: 29, SEQ ID NO: 30, SEQ ID NO: 31, SEQ ID NO: 32, SEQ ID NO: 33, SEQ ID NO: 34, SEQ ID NO: 35, SEQ ID NO: 36, SEQ ID NO: 37, SEQ ID NO: 38, SEQ ID NO: 39, SEQ ID NO: 40, SEQ ID NO: 41, SEQ ID NO: 42, SEQ ID NO: 43, SEQ ID NO: 44, SEQ ID NO: 45, SEQ ID NO: 46, SEQ ID NO: 47, SEQ ID NO: 48, SEQ ID NO: 49, or SEQ ID NO: 50.

[0210] In some examples of any of the ABPCs described herein, the first antigen-binding domain includes a light chain variable domain comprising SEQ ID NO: 69, and a heavy chain variable domain comprising: SEQ ID NO: 1, SEQ ID NO: 13, SEQ ID NO: 14, SEQ ID NO: 15, SEQ ID NO: 16, SEQ ID NO: 17, SEQ ID NO: 18, SEQ ID NO: 19, SEQ ID NO: 20, SEQ ID NO: 21, SEQ ID NO: 22, SEQ ID NO: 23, SEQ ID NO: 24, SEQ ID NO: 25, SEQ ID NO: 26, SEQ ID NO: 27, SEQ ID NO: 28, SEQ ID NO: 29, SEQ ID NO: 30, SEQ ID NO: 31, SEQ ID NO: 32, SEQ ID NO: 33, SEQ ID NO: 34, SEQ ID NO: 35, SEQ ID NO: 36, SEQ ID NO: 37, SEQ ID NO: 38, SEQ ID NO: 39, SEQ ID NO: 40, SEQ ID NO: 41, SEQ ID NO: 42, SEQ ID NO: 43, SEQ ID NO: 44, SEQ ID NO: 45, SEQ ID NO: 46, SEQ ID NO: 47, SEQ ID NO: 48, SEQ ID NO: 49, or SEQ ID NO: 50.

[0211] In some examples of any of the ABPCs described herein, the first antigen-binding domain includes a light chain variable domain comprising SEQ ID NO: 70, and a heavy chain variable domain comprising: SEQ ID NO: 1, SEQ ID NO: 13, SEQ ID NO: 14, SEQ ID NO: 15, SEQ ID NO: 16, SEQ ID NO: 17, SEQ ID NO: 18, SEQ ID NO: 19, SEQ ID NO: 20, SEQ ID NO: 21, SEQ ID NO: 22, SEQ ID NO: 23, SEQ ID NO: 24, SEQ ID NO: 25, SEQ ID NO: 26, SEQ ID NO: 27, SEQ ID NO: 28, SEQ ID NO: 29, SEQ ID NO: 30, SEQ ID NO: 31, SEQ ID NO: 32, SEQ ID NO: 33, SEQ ID NO: 34, SEQ ID NO: 35, SEQ ID NO: 36, SEQ ID NO: 37, SEQ ID NO: 38, SEQ ID NO: 39, SEQ ID NO: 40, SEQ ID NO: 41, SEQ ID NO: 42, SEQ ID NO: 43, SEQ ID NO: 44, SEQ ID NO: 45, SEQ ID NO: 46, SEQ ID NO: 47, SEQ ID NO: 48, SEQ ID NO: 49, or SEQ ID NO: 50.

[0212] In some examples of any of the ABPCs described herein, the first antigen-binding domain includes a light chain variable domain comprising SEQ ID NO: 71, and a heavy chain variable domain comprising: SEQ ID NO: 1, SEQ ID NO: 13, SEQ ID NO: 14, SEQ ID NO: 15, SEQ ID NO: 16, SEQ ID NO: 17, SEQ ID NO: 18, SEQ ID NO: 19, SEQ ID NO: 20, SEQ ID NO: 21, SEQ ID NO: 22, SEQ ID NO: 23, SEQ ID NO: 24, SEQ ID NO: 25, SEQ ID NO: 26, SEQ ID NO: 27, SEQ ID NO: 28, SEQ ID NO: 29, SEQ ID NO: 30, SEQ ID NO: 31, SEQ ID NO: 32, SEQ ID NO: 33, SEQ ID NO: 34, SEQ ID NO: 35, SEQ ID NO: 36, SEQ ID NO: 37, SEQ ID NO: 38, SEQ ID NO: 39, SEQ ID NO: 40, SEQ ID NO: 41, SEQ ID NO: 42, SEQ ID NO: 43, SEQ ID NO: 44, SEQ ID NO: 45, SEQ ID NO: 46, SEQ ID NO: 47, SEQ ID NO: 48, SEQ ID NO: 49, or SEQ ID NO: 50.

[0213] In some examples of any of the ABPCs described herein, the first antigen-binding domain includes a light chain variable domain comprising SEQ ID NO: 72, and a heavy chain variable domain comprising: SEQ ID NO: 1, SEQ ID NO: 13, SEQ ID NO: 14, SEQ ID NO: 15, SEQ ID NO: 16, SEQ ID NO: 17, SEQ ID NO: 18, SEQ ID NO: 19, SEQ ID NO: 20, SEQ ID NO: 21, SEQ ID NO: 22, SEQ ID NO: 23, SEQ ID NO: 24, SEQ ID NO: 25, SEQ ID NO: 26, SEQ ID NO: 27, SEQ ID NO: 28, SEQ ID NO: 29, SEQ ID NO: 30, SEQ ID NO: 31, SEQ ID NO: 32, SEQ ID NO: 33, SEQ ID NO: 34, SEQ ID NO: 35, SEQ ID NO: 36, SEQ ID NO: 37, SEQ ID NO: 38, SEQ ID NO: 39, SEQ ID NO: 40, SEQ ID NO: 41, SEQ ID NO: 42, SEQ ID NO: 43, SEQ ID NO: 44, SEQ ID NO: 45, SEQ ID NO: 46, SEQ ID NO: 47, SEQ ID NO: 48, SEQ ID NO: 49, or SEQ ID NO: 50.

[0214] In some examples of any of the ABPCs described herein, the first antigen-binding domain includes a light chain variable domain comprising SEQ ID NO: 73, and a heavy chain variable domain comprising: SEQ ID NO: 1, SEQ ID NO: 13, SEQ ID NO: 14, SEQ ID NO: 15, SEQ ID NO: 16, SEQ ID NO: 17, SEQ ID NO: 18, SEQ ID NO: 19, SEQ ID NO: 20, SEQ ID NO: 21, SEQ ID NO: 22, SEQ ID NO: 23, SEQ ID NO: 24, SEQ ID NO: 25, SEQ ID NO: 26, SEQ ID NO: 27, SEQ ID NO: 28, SEQ ID NO: 29, SEQ ID NO: 30, SEQ ID NO: 31, SEQ ID NO: 32, SEQ ID NO: 33, SEQ ID NO: 34, SEQ ID NO: 35, SEQ ID NO: 36, SEQ ID NO: 37, SEQ ID NO: 38, SEQ ID NO: 39, SEQ ID NO: 40, SEQ ID NO: 41, SEQ ID NO: 42, SEQ ID NO: 43, SEQ ID NO: 44, SEQ ID NO: 45, SEQ ID NO: 46, SEQ ID NO: 47, SEQ ID NO: 48, SEQ ID NO: 49, or SEQ ID NO: 50.

[0215] In some examples of any of the ABPCs described herein, the first antigen-binding domain includes a light chain variable domain comprising SEQ ID NO: 74, and a heavy chain variable domain comprising: SEQ ID NO: 1, SEQ ID NO: 13, SEQ ID NO: 14, SEQ ID NO: 15, SEQ ID NO: 16, SEQ ID NO: 17, SEQ ID NO: 18, SEQ ID NO: 19, SEQ ID NO: 20, SEQ ID NO: 21, SEQ ID NO: 22, SEQ ID NO: 23, SEQ ID NO: 24, SEQ ID NO: 25, SEQ ID NO: 26, SEQ ID NO: 27, SEQ ID NO: 28, SEQ ID NO: 29, SEQ ID NO: 30, SEQ ID NO: 31, SEQ ID NO: 32, SEQ ID NO: 33, SEQ ID NO: 34, SEQ ID NO: 35, SEQ ID NO: 36, SEQ ID NO: 37, SEQ ID NO: 38, SEQ ID NO: 39, SEQ ID NO: 40, SEQ ID NO: 41, SEQ ID NO: 42, SEQ ID NO: 43, SEQ ID NO: 44, SEQ ID NO: 45, SEQ ID NO: 46, SEQ ID NO: 47, SEQ ID NO: 48, SEQ ID NO: 49, or SEQ ID NO: 50.

[0216] In some examples of any of the ABPCs described herein, the first antigen-binding domain includes a light chain variable domain comprising SEQ ID NO: 75, and a heavy chain variable domain comprising: SEQ ID NO: 1, SEQ ID NO: 13, SEQ ID NO: 14, SEQ ID NO: 15, SEQ ID NO: 16, SEQ ID NO: 17, SEQ ID NO: 18, SEQ ID NO: 19, SEQ ID NO: 20, SEQ ID NO: 21, SEQ ID NO: 22, SEQ ID NO: 23, SEQ ID NO: 24, SEQ ID NO: 25, SEQ ID NO: 26, SEQ ID NO: 27, SEQ ID NO: 28, SEQ ID NO: 29, SEQ ID NO: 30, SEQ ID NO: 31, SEQ ID NO: 32, SEQ ID NO: 33, SEQ ID NO: 34, SEQ ID NO: 35, SEQ ID NO: 36, SEQ ID NO: 37, SEQ ID NO: 38, SEQ ID NO: 39, SEQ ID NO: 40, SEQ ID NO: 41, SEQ ID NO: 42, SEQ ID NO: 43, SEQ ID NO: 44, SEQ ID NO: 45, SEQ ID NO: 46, SEQ ID NO: 47, SEQ ID NO: 48, SEQ ID NO: 49, or SEQ ID NO: 50.

[0217] In some examples of any of the ABPCs described herein, the first antigen-binding domain includes a light chain variable domain comprising SEQ ID NO: 76, and a heavy chain variable domain comprising: SEQ ID NO: 1, SEQ ID NO: 13, SEQ ID NO: 14, SEQ ID NO: 15, SEQ ID NO: 16, SEQ ID NO: 17, SEQ ID NO: 18, SEQ ID NO: 19, SEQ ID NO: 20, SEQ ID NO: 21, SEQ ID NO: 22, SEQ ID NO: 23, SEQ ID NO: 24, SEQ ID NO: 25, SEQ ID NO: 26, SEQ ID NO: 27, SEQ ID NO: 28, SEQ ID NO: 29, SEQ ID NO: 30, SEQ ID NO: 31, SEQ ID NO: 32, SEQ ID NO: 33, SEQ ID NO: 34, SEQ ID NO: 35, SEQ ID NO: 36, SEQ ID NO: 37, SEQ ID NO: 38, SEQ ID NO: 39, SEQ ID NO: 40, SEQ ID NO: 41, SEQ ID NO: 42, SEQ ID NO: 43, SEQ ID NO: 44, SEQ ID NO: 45, SEQ ID NO: 46, SEQ ID NO: 47, SEQ ID NO: 48, SEQ ID NO: 49, or SEQ ID NO: 50.

[0218] In some examples of any of the ABPCs described herein, the first antigen-binding domain includes a light chain variable domain comprising SEQ ID NO: 77, and a heavy chain variable domain comprising: SEQ ID NO: 1, SEQ ID NO: 13, SEQ ID NO: 14, SEQ ID NO: 15, SEQ ID NO: 16, SEQ ID NO: 17, SEQ ID NO: 18, SEQ ID NO: 19, SEQ ID NO: 20, SEQ ID NO: 21, SEQ ID NO: 22, SEQ ID NO: 23, SEQ ID NO: 24, SEQ ID NO: 25, SEQ ID NO: 26, SEQ ID NO: 27, SEQ ID NO: 28, SEQ ID NO: 29, SEQ ID NO: 30, SEQ ID NO: 31, SEQ ID NO: 32, SEQ ID NO: 33, SEQ ID NO: 34, SEQ ID NO: 35, SEQ ID NO: 36, SEQ ID NO: 37, SEQ ID NO: 38, SEQ ID NO: 39, SEQ ID NO: 40, SEQ ID NO: 41, SEQ ID NO: 42, SEQ ID NO: 43, SEQ ID NO: 44, SEQ ID NO: 45, SEQ ID NO: 46, SEQ ID NO: 47, SEQ ID NO: 48, SEQ ID NO: 49, or SEQ ID NO: 50.

[0219] In some examples of any of the ABPCs described herein, the first antigen-binding domain includes a light chain variable domain comprising SEQ ID NO: 78, and a heavy chain variable domain comprising: SEQ ID NO: 1, SEQ ID NO: 13, SEQ ID NO: 14, SEQ ID NO: 15, SEQ ID NO: 16, SEQ ID NO: 17, SEQ ID NO: 18, SEQ ID NO: 19, SEQ ID NO: 20, SEQ ID NO: 21, SEQ ID NO: 22, SEQ ID NO: 23, SEQ ID NO: 24, SEQ ID NO: 25, SEQ ID NO: 26, SEQ ID NO: 27, SEQ ID NO: 28, SEQ ID NO: 29, SEQ ID NO: 30, SEQ ID NO: 31, SEQ ID NO: 32, SEQ ID NO: 33, SEQ ID NO: 34, SEQ ID NO: 35, SEQ ID NO: 36, SEQ ID NO: 37, SEQ ID NO: 38, SEQ ID NO: 39, SEQ ID NO: 40, SEQ ID NO: 41, SEQ ID NO: 42, SEQ ID NO: 43, SEQ ID NO: 44, SEQ ID NO: 45, SEQ ID NO: 46, SEQ ID NO: 47, SEQ ID NO: 48, SEQ ID NO: 49, or SEQ ID NO: 50.

[0220] In some examples of any of the ABPCs described herein, the first antigen-binding domain includes a light chain variable domain comprising SEQ ID NO: 79, and a heavy chain variable domain comprising: SEQ ID NO: 1, SEQ ID NO: 13, SEQ ID NO: 14, SEQ ID NO: 15, SEQ ID NO: 16, SEQ ID NO: 17, SEQ ID NO: 18, SEQ ID NO: 19, SEQ ID NO: 20, SEQ ID NO: 21, SEQ ID NO: 22, SEQ ID NO: 23, SEQ ID NO: 24, SEQ ID NO: 25, SEQ ID NO: 26, SEQ ID NO: 27, SEQ ID NO: 28, SEQ ID NO: 29, SEQ ID NO: 30, SEQ ID NO: 31, SEQ ID NO: 32, SEQ ID NO: 33, SEQ ID NO: 34, SEQ ID NO: 35, SEQ ID NO: 36, SEQ ID NO: 37, SEQ ID NO: 38, SEQ ID NO: 39, SEQ ID NO: 40, SEQ ID NO: 41, SEQ ID NO: 42, SEQ ID NO: 43, SEQ ID NO: 44, SEQ ID NO: 45, SEQ ID NO: 46, SEQ ID NO: 47, SEQ ID NO: 48, SEQ ID NO: 49, or SEQ ID NO: 50.

[0221] In some examples of any of the ABPCs described herein, the first antigen-binding domain includes a light chain variable domain comprising SEQ ID NO: 80, and a heavy chain variable domain comprising: SEQ ID NO: 1, SEQ ID NO: 13, SEQ ID NO: 14, SEQ ID NO: 15, SEQ ID NO: 16, SEQ ID NO: 17, SEQ ID NO: 18, SEQ ID NO: 19, SEQ ID NO: 20, SEQ ID NO: 21, SEQ ID NO: 22, SEQ ID NO: 23, SEQ ID NO: 24, SEQ ID NO: 25, SEQ ID NO: 26, SEQ ID NO: 27, SEQ ID NO: 28, SEQ ID NO: 29, SEQ ID NO: 30, SEQ ID NO: 31, SEQ ID NO: 32, SEQ ID NO: 33, SEQ ID NO: 34, SEQ ID NO: 35, SEQ ID NO: 36, SEQ ID NO: 37, SEQ ID NO: 38, SEQ ID NO: 39, SEQ ID NO: 40, SEQ ID NO: 41, SEQ ID NO: 42, SEQ ID NO: 43, SEQ ID NO: 44, SEQ ID NO: 45, SEQ ID NO: 46, SEQ ID NO: 47, SEQ ID NO: 48, SEQ ID NO: 49, or SEQ ID NO: 50.

[0222] In some examples of any of the ABPCs described herein, the first antigen-binding domain includes a light chain variable domain comprising SEQ ID NO: 81, and a heavy chain variable domain comprising: SEQ ID NO: 1, SEQ ID NO: 13, SEQ ID NO: 14, SEQ ID NO: 15, SEQ ID NO: 16, SEQ ID NO: 17, SEQ ID NO: 18, SEQ ID NO: 19, SEQ ID NO: 20, SEQ ID NO: 21, SEQ ID NO: 22, SEQ ID NO: 23, SEQ ID NO: 24, SEQ ID NO: 25, SEQ ID NO: 26, SEQ ID NO: 27, SEQ ID NO: 28, SEQ ID NO: 29, SEQ ID NO: 30, SEQ ID NO: 31, SEQ ID NO: 32, SEQ ID NO: 33, SEQ ID NO: 34, SEQ ID NO: 35, SEQ ID NO: 36, SEQ ID NO: 37, SEQ ID NO: 38, SEQ ID NO: 39, SEQ ID NO: 40, SEQ ID NO: 41, SEQ ID NO: 42, SEQ ID NO: 43, SEQ ID NO: 44, SEQ ID NO: 45, SEQ ID NO: 46, SEQ ID NO: 47, SEQ ID NO: 48, SEQ ID NO: 49, or SEQ ID NO: 50.

[0223] In some examples of any of the ABPCs described herein, the first antigen-binding domain includes a heavy chain variable domain comprising SEQ ID NO: 82, SEQ ID NO: 83, SEQ ID NO: 84, SEQ ID NO: 85, SEQ ID NO: 86, SEQ ID NO: 87, SEQ ID NO: 88, SEQ ID NO: 89, SEQ ID NO: 90, SEQ ID NO: 91, SEQ ID NO: 92, SEQ ID NO: 93, SEQ ID NO: 94, SEQ ID NO: 95, SEQ ID NO: 96, SEQ ID NO: 97, SEQ ID NO: 98, SEQ ID NO: 99, SEQ ID NO: 100, SEQ ID NO: 101, SEQ ID NO: 102, SEQ ID NO: 103, SEQ ID NO: 104, SEQ ID NO: 105, SEQ ID NO: 106, SEQ ID NO: 107, SEQ ID NO: 108, SEQ ID NO: 109, SEQ ID NO: 110, SEQ ID NO: 111, SEQ ID NO: 112, SEQ ID NO: 113, SEQ ID NO: 114, SEQ ID NO: 115, SEQ ID NO: 116, SEQ ID NO: 117, SEQ ID NO: 118, SEQ ID NO: 119, SEQ ID NO: 120, SEQ ID NO: 121, SEQ ID NO: 122, SEQ ID NO: 123, SEQ ID NO: 124, SEQ ID NO: 125, SEQ ID NO: 126, SEQ ID NO: 127, SEQ ID NO: 128, SEQ ID NO: 129, or SEQ ID NO: 130.

[0224] In some examples of any of the ABPCs described herein, the first antigen-binding domain includes a heavy chain variable domain comprising SEQ ID NO: 82, and a light chain variable domain comprising SEQ ID NO: 2, SEQ ID NO: 51, SEQ ID NO: 52, SEQ ID NO: 53, SEQ ID NO: 54, SEQ ID NO: 55, SEQ ID NO: 56, SEQ ID NO: 57, SEQ ID NO: 58, SEQ ID NO: 59, SEQ ID NO: 60, SEQ ID NO: 61, SEQ ID NO: 62, SEQ ID NO: 63, SEQ ID NO: 64, SEQ ID NO: 65, SEQ ID NO: 66, SEQ ID NO: 67, SEQ ID NO: 68, SEQ ID NO: 69, SEQ ID NO: 70, SEQ ID NO: 71, SEQ ID NO: 72, SEQ ID NO: 73, SEQ ID NO: 74, SEQ ID NO: 75, SEQ ID NO: 76, SEQ ID NO: 77, SEQ ID NO: 78, SEQ ID NO: 79, SEQ ID NO: 80, or SEQ ID NO: 81.

[0225] In some examples of any of the ABPCs described herein, the first antigen-binding domain includes a heavy chain variable domain comprising SEQ ID NO: 83, and a light chain variable domain comprising SEQ ID NO: 2, SEQ ID NO: 51, SEQ ID NO: 52, SEQ ID NO: 53, SEQ ID NO: 54, SEQ ID NO: 55, SEQ ID NO: 56, SEQ ID NO: 57, SEQ ID NO: 58, SEQ ID NO: 59, SEQ ID NO: 60, SEQ ID NO: 61, SEQ ID NO: 62, SEQ ID NO: 63, SEQ ID NO: 64, SEQ ID NO: 65, SEQ ID NO: 66, SEQ ID NO: 67, SEQ ID NO: 68, SEQ ID NO: 69, SEQ ID NO: 70, SEQ ID NO: 71, SEQ ID NO: 72, SEQ ID NO: 73, SEQ ID NO: 74, SEQ ID NO: 75, SEQ ID NO: 76, SEQ ID NO: 77, SEQ ID NO: 78, SEQ ID NO: 79, SEQ ID NO: 80, or SEQ ID NO: 81.

[0226] In some examples of any of the ABPCs described herein, the first antigen-binding domain includes a heavy chain variable domain comprising SEQ ID NO: 84, and a light chain variable domain comprising SEQ ID NO: 2, SEQ ID NO: 51, SEQ ID NO: 52, SEQ ID NO: 53, SEQ ID NO: 54, SEQ ID NO: 55, SEQ ID NO: 56, SEQ ID NO: 57, SEQ ID NO: 58, SEQ ID NO: 59, SEQ ID NO: 60, SEQ ID NO: 61, SEQ ID NO: 62, SEQ ID NO: 63, SEQ ID NO: 64, SEQ ID NO: 65, SEQ ID NO: 66, SEQ ID NO: 67, SEQ ID NO: 68, SEQ ID NO: 69, SEQ ID NO: 70, SEQ ID NO: 71, SEQ ID NO: 72, SEQ ID NO: 73, SEQ ID NO: 74, SEQ ID NO: 75, SEQ ID NO: 76, SEQ ID NO: 77, SEQ ID NO: 78, SEQ ID NO: 79, SEQ ID NO: 80, or SEQ ID NO: 81.

[0227] In some examples of any of the ABPCs described herein, the first antigen-binding domain includes a heavy chain variable domain comprising SEQ ID NO: 85, and a light chain variable domain comprising SEQ ID NO: 2, SEQ ID NO: 51, SEQ ID NO: 52, SEQ ID NO: 53, SEQ ID NO: 54, SEQ ID NO: 55, SEQ ID NO: 56, SEQ ID NO: 57, SEQ ID NO: 58, SEQ ID NO: 59, SEQ ID NO: 60, SEQ ID NO: 61, SEQ ID NO: 62, SEQ ID NO: 63, SEQ ID NO: 64, SEQ ID NO: 65, SEQ ID NO: 66, SEQ ID NO: 67, SEQ ID NO: 68, SEQ ID NO: 69, SEQ ID NO: 70, SEQ ID NO: 71, SEQ ID NO: 72, SEQ ID NO: 73, SEQ ID NO: 74, SEQ ID NO: 75, SEQ ID NO: 76, SEQ ID NO: 77, SEQ ID NO: 78, SEQ ID NO: 79, SEQ ID NO: 80, or SEQ ID NO: 81.

[0228] In some examples of any of the ABPCs described herein, the first antigen-binding domain includes a heavy chain variable domain comprising SEQ ID NO: 86, and a light chain variable domain comprising SEQ ID NO: 2, SEQ ID NO: 51, SEQ ID NO: 52, SEQ ID NO: 53, SEQ ID NO: 54, SEQ ID NO: 55, SEQ ID NO: 56, SEQ ID NO: 57, SEQ ID NO: 58, SEQ ID NO: 59, SEQ ID NO: 60, SEQ ID NO: 61, SEQ ID NO: 62, SEQ ID NO: 63, SEQ ID NO: 64, SEQ ID NO: 65, SEQ ID NO: 66, SEQ ID NO: 67, SEQ ID NO: 68, SEQ ID NO: 69, SEQ ID NO: 70, SEQ ID NO: 71, SEQ ID NO: 72, SEQ ID NO: 73, SEQ ID NO: 74, SEQ ID NO: 75, SEQ ID NO: 76, SEQ ID NO: 77, SEQ ID NO: 78, SEQ ID NO: 79, SEQ ID NO: 80, or SEQ ID NO: 81.

[0229] In some examples of any of the ABPCs described herein, the first antigen-binding domain includes a heavy chain variable domain comprising SEQ ID NO: 87, and a light chain variable domain comprising SEQ ID NO: 2, SEQ ID NO: 51, SEQ ID NO: 52, SEQ ID NO: 53, SEQ ID NO: 54, SEQ ID NO: 55, SEQ ID NO: 56, SEQ ID NO: 57, SEQ ID NO: 58, SEQ ID NO: 59, SEQ ID NO: 60, SEQ ID NO: 61, SEQ ID NO: 62, SEQ ID NO: 63, SEQ ID NO: 64, SEQ ID NO: 65, SEQ ID NO: 66, SEQ ID NO: 67, SEQ ID NO: 68, SEQ ID NO: 69, SEQ ID NO: 70, SEQ ID NO: 71, SEQ ID NO: 72, SEQ ID NO: 73, SEQ ID NO: 74, SEQ ID NO: 75, SEQ ID NO: 76, SEQ ID NO: 77, SEQ ID NO: 78, SEQ ID NO: 79, SEQ ID NO: 80, or SEQ ID NO: 81.

[0230] In some examples of any of the ABPCs described herein, the first antigen-binding domain includes a heavy chain variable domain comprising SEQ ID NO: 88, and a light chain variable domain comprising SEQ ID NO: 2, SEQ ID NO: 51, SEQ ID NO: 52, SEQ ID NO: 53, SEQ ID NO: 54, SEQ ID NO: 55, SEQ ID NO: 56, SEQ ID NO: 57, SEQ ID NO: 58, SEQ ID NO: 59, SEQ ID NO: 60, SEQ ID NO: 61, SEQ ID NO: 62, SEQ ID NO: 63, SEQ ID NO: 64, SEQ ID NO: 65, SEQ ID NO: 66, SEQ ID NO: 67, SEQ ID NO: 68, SEQ ID NO: 69, SEQ ID NO: 70, SEQ ID NO: 71, SEQ ID NO: 72, SEQ ID NO: 73, SEQ ID NO: 74, SEQ ID NO: 75, SEQ ID NO: 76, SEQ ID NO: 77, SEQ ID NO: 78, SEQ ID NO: 79, SEQ ID NO: 80, or SEQ ID NO: 81.

[0231] In some examples of any of the ABPCs described herein, the first antigen-binding domain includes a heavy chain variable domain comprising SEQ ID NO: 89, and a light chain variable domain comprising SEQ ID NO: 2, SEQ ID NO: 51, SEQ ID NO: 52, SEQ ID NO: 53, SEQ ID NO: 54, SEQ ID NO: 55, SEQ ID NO: 56, SEQ ID NO: 57, SEQ ID NO: 58, SEQ ID NO: 59, SEQ ID NO: 60, SEQ ID NO: 61, SEQ ID NO: 62, SEQ ID NO: 63, SEQ ID NO: 64, SEQ ID NO: 65, SEQ ID NO: 66, SEQ ID NO: 67, SEQ ID NO: 68, SEQ ID NO: 69, SEQ ID NO: 70, SEQ ID NO: 71, SEQ ID NO: 72, SEQ ID NO: 73, SEQ ID NO: 74, SEQ ID NO: 75, SEQ ID NO: 76, SEQ ID NO: 77, SEQ ID NO: 78, SEQ ID NO: 79, SEQ ID NO: 80, or SEQ ID NO: 81.

[0232] In some examples of any of the ABPCs described herein, the first antigen-binding domain includes a heavy chain variable domain comprising SEQ ID NO: 90, and a light chain variable domain comprising SEQ ID NO: 2, SEQ ID NO: 51, SEQ ID NO: 52, SEQ ID NO: 53, SEQ ID NO: 54, SEQ ID NO: 55, SEQ ID NO: 56, SEQ ID NO: 57, SEQ ID NO: 58, SEQ ID NO: 59, SEQ ID NO: 60, SEQ ID NO: 61, SEQ ID NO: 62, SEQ ID NO: 63, SEQ ID NO: 64, SEQ ID NO: 65, SEQ ID NO: 66, SEQ ID NO: 67, SEQ ID NO: 68, SEQ ID NO: 69, SEQ ID NO: 70, SEQ ID NO: 71, SEQ ID NO: 72, SEQ ID NO: 73, SEQ ID NO: 74, SEQ ID NO: 75, SEQ ID NO: 76, SEQ ID NO: 77, SEQ ID NO: 78, SEQ ID NO: 79, SEQ ID NO: 80, or SEQ ID NO: 81.

[0233] In some examples of any of the ABPCs described herein, the first antigen-binding domain includes a heavy chain variable domain comprising SEQ ID NO: 91, and a light chain variable domain comprising SEQ ID NO: 2, SEQ ID NO: 51, SEQ ID NO: 52, SEQ ID NO: 53, SEQ ID NO: 54, SEQ ID NO: 55, SEQ ID NO: 56, SEQ ID NO: 57, SEQ ID NO: 58, SEQ ID NO: 59, SEQ ID NO: 60, SEQ ID NO: 61, SEQ ID NO: 62, SEQ ID NO: 63, SEQ ID NO: 64, SEQ ID NO: 65, SEQ ID NO: 66, SEQ ID NO: 67, SEQ ID NO: 68, SEQ ID NO: 69, SEQ ID NO: 70, SEQ ID NO: 71, SEQ ID NO: 72, SEQ ID NO: 73, SEQ ID NO: 74, SEQ ID NO: 75, SEQ ID NO: 76, SEQ ID NO: 77, SEQ ID NO: 78, SEQ ID NO: 79, SEQ ID NO: 80, or SEQ ID NO: 81.

[0234] In some examples of any of the ABPCs described herein, the first antigen-binding domain includes a heavy chain variable domain comprising SEQ ID NO: 92, and a light chain variable domain comprising SEQ ID NO: 2, SEQ ID NO: 51, SEQ ID NO: 52, SEQ ID NO: 53, SEQ ID NO: 54, SEQ ID NO: 55, SEQ ID NO: 56, SEQ ID NO: 57, SEQ ID NO: 58, SEQ ID NO: 59, SEQ ID NO: 60, SEQ ID NO: 61, SEQ ID NO: 62, SEQ ID NO: 63, SEQ ID NO: 64, SEQ ID NO: 65, SEQ ID NO: 66, SEQ ID NO: 67, SEQ ID NO: 68, SEQ ID NO: 69, SEQ ID NO: 70, SEQ ID NO: 71, SEQ ID NO: 72, SEQ ID NO: 73, SEQ ID NO: 74, SEQ ID NO: 75, SEQ ID NO: 76, SEQ ID NO: 77, SEQ ID NO: 78, SEQ ID NO: 79, SEQ ID NO: 80, or SEQ ID NO: 81.

[0235] In some examples of any of the ABPCs described herein, the first antigen-binding domain includes a heavy chain variable domain comprising SEQ ID NO: 93, and a light chain variable domain comprising SEQ ID NO: 2, SEQ ID NO: 51, SEQ ID NO: 52, SEQ ID NO: 53, SEQ ID NO: 54, SEQ ID NO: 55, SEQ ID NO: 56, SEQ ID NO: 57, SEQ ID NO: 58, SEQ ID NO: 59, SEQ ID NO: 60, SEQ ID NO: 61, SEQ ID NO: 62, SEQ ID NO: 63, SEQ ID NO: 64, SEQ ID NO: 65, SEQ ID NO: 66, SEQ ID NO: 67, SEQ ID NO: 68, SEQ ID NO: 69, SEQ ID NO: 70, SEQ ID NO: 71, SEQ ID NO: 72, SEQ ID NO: 73, SEQ ID NO: 74, SEQ ID NO: 75, SEQ ID NO: 76, SEQ ID NO: 77, SEQ ID NO: 78, SEQ ID NO: 79, SEQ ID NO: 80, or SEQ ID NO: 81.

[0236] In some examples of any of the ABPCs described herein, the first antigen-binding domain includes a heavy chain variable domain comprising SEQ ID NO: 94, and a light chain variable domain comprising SEQ ID NO: 2, SEQ ID NO: 51, SEQ ID NO: 52, SEQ ID NO: 53, SEQ ID NO: 54, SEQ ID NO: 55, SEQ ID NO: 56, SEQ ID NO: 57, SEQ ID NO: 58, SEQ ID NO: 59, SEQ ID NO: 60, SEQ ID NO: 61, SEQ ID NO: 62, SEQ ID NO: 63, SEQ ID NO: 64, SEQ ID NO: 65, SEQ ID NO: 66, SEQ ID NO: 67, SEQ ID NO: 68, SEQ ID NO: 69, SEQ ID NO: 70, SEQ ID NO: 71, SEQ ID NO: 72, SEQ ID NO: 73, SEQ ID NO: 74, SEQ ID NO: 75, SEQ ID NO: 76, SEQ ID NO: 77, SEQ ID NO: 78, SEQ ID NO: 79, SEQ ID NO: 80, or SEQ ID NO: 81.

[0237] In some examples of any of the ABPCs described herein, the first antigen-binding domain includes a heavy chain variable domain comprising SEQ ID NO: 95, and a light chain variable domain comprising SEQ ID NO: 2, SEQ ID NO: 51, SEQ ID NO: 52, SEQ ID NO: 53, SEQ ID NO: 54, SEQ ID NO: 55, SEQ ID NO: 56, SEQ ID NO: 57, SEQ ID NO: 58, SEQ ID NO: 59, SEQ ID NO: 60, SEQ ID NO: 61, SEQ ID NO: 62, SEQ ID NO: 63, SEQ ID NO: 64, SEQ ID NO: 65, SEQ ID NO: 66, SEQ ID NO: 67, SEQ ID NO: 68, SEQ ID NO: 69, SEQ ID NO: 70, SEQ ID NO: 71, SEQ ID NO: 72, SEQ ID NO: 73, SEQ ID NO: 74, SEQ ID NO: 75, SEQ ID NO: 76, SEQ ID NO: 77, SEQ ID NO: 78, SEQ ID NO: 79, SEQ ID NO: 80, or SEQ ID NO: 81.

[0238] In some examples of any of the ABPCs described herein, the first antigen-binding domain includes a heavy chain variable domain comprising SEQ ID NO: 96, and a light chain variable domain comprising SEQ ID NO: 2, SEQ ID NO: 51, SEQ ID NO: 52, SEQ ID NO: 53, SEQ ID NO: 54, SEQ ID NO: 55, SEQ ID NO: 56, SEQ ID NO: 57, SEQ ID NO: 58, SEQ ID NO: 59, SEQ ID NO: 60, SEQ ID NO: 61, SEQ ID NO: 62, SEQ ID NO: 63, SEQ ID NO: 64, SEQ ID NO: 65, SEQ ID NO: 66, SEQ ID NO: 67, SEQ ID NO: 68, SEQ ID NO: 69, SEQ ID NO: 70, SEQ ID NO: 71, SEQ ID NO: 72, SEQ ID NO: 73, SEQ ID NO: 74, SEQ ID NO: 75, SEQ ID NO: 76, SEQ ID NO: 77, SEQ ID NO: 78, SEQ ID NO: 79, SEQ ID NO: 80, or SEQ ID NO: 81.

[0239] In some examples of any of the ABPCs described herein, the first antigen-binding domain includes a heavy chain variable domain comprising SEQ ID NO: 97, and a light chain variable domain comprising SEQ ID NO: 2, SEQ ID NO: 51, SEQ ID NO: 52, SEQ ID NO: 53, SEQ ID NO: 54, SEQ ID NO: 55, SEQ ID NO: 56, SEQ ID NO: 57, SEQ ID NO: 58, SEQ ID NO: 59, SEQ ID NO: 60, SEQ ID NO: 61, SEQ ID NO: 62, SEQ ID NO: 63, SEQ ID NO: 64, SEQ ID NO: 65, SEQ ID NO: 66, SEQ ID NO: 67, SEQ ID NO: 68, SEQ ID NO: 69, SEQ ID NO: 70, SEQ ID NO: 71, SEQ ID NO: 72, SEQ ID NO: 73, SEQ ID NO: 74, SEQ ID NO: 75, SEQ ID NO: 76, SEQ ID NO: 77, SEQ ID NO: 78, SEQ ID NO: 79, SEQ ID NO: 80, or SEQ ID NO: 81.

[0240] In some examples of any of the ABPCs described herein, the first antigen-binding domain includes a heavy chain variable domain comprising SEQ ID NO: 98, and a light chain variable domain comprising SEQ ID NO: 2, SEQ ID NO: 51, SEQ ID NO: 52, SEQ ID NO: 53, SEQ ID NO: 54, SEQ ID NO: 55, SEQ ID NO: 56, SEQ ID NO: 57, SEQ ID NO: 58, SEQ ID NO: 59, SEQ ID NO: 60, SEQ ID NO: 61, SEQ ID NO: 62, SEQ ID NO: 63, SEQ ID NO: 64, SEQ ID NO: 65, SEQ ID NO: 66, SEQ ID NO: 67, SEQ ID NO: 68, SEQ ID NO: 69, SEQ ID NO: 70, SEQ ID NO: 71, SEQ ID NO: 72, SEQ ID NO: 73, SEQ ID NO: 74, SEQ ID NO: 75, SEQ ID NO: 76, SEQ ID NO: 77, SEQ ID NO: 78, SEQ ID NO: 79, SEQ ID NO: 80, or SEQ ID NO: 81.

[0241] In some examples of any of the ABPCs described herein, the first antigen-binding domain includes a heavy chain variable domain comprising SEQ ID NO: 99, and a light chain variable domain comprising SEQ ID NO: 2, SEQ ID NO: 51, SEQ ID NO: 52, SEQ ID NO: 53, SEQ ID NO: 54, SEQ ID NO: 55, SEQ ID NO: 56, SEQ ID NO: 57, SEQ ID NO: 58, SEQ ID NO: 59, SEQ ID NO: 60, SEQ ID NO: 61, SEQ ID NO: 62, SEQ ID NO: 63, SEQ ID NO: 64, SEQ ID NO: 65, SEQ ID NO: 66, SEQ ID NO: 67, SEQ ID NO: 68, SEQ ID NO: 69, SEQ ID NO: 70, SEQ ID NO: 71, SEQ ID NO: 72, SEQ ID NO: 73, SEQ ID NO: 74, SEQ ID NO: 75, SEQ ID NO: 76, SEQ ID NO: 77, SEQ ID NO: 78, SEQ ID NO: 79, SEQ ID NO: 80, or SEQ ID NO: 81.

[0242] In some examples of any of the ABPCs described herein, the first antigen-binding domain includes a heavy chain variable domain comprising SEQ ID NO: 100, and a light chain variable domain comprising SEQ ID NO: 2, SEQ ID NO: 51, SEQ ID NO: 52, SEQ ID NO: 53, SEQ ID NO: 54, SEQ ID NO: 55, SEQ ID NO: 56, SEQ ID NO: 57, SEQ ID NO: 58, SEQ ID NO: 59, SEQ ID NO: 60, SEQ ID NO: 61, SEQ ID NO: 62, SEQ ID NO: 63, SEQ ID NO: 64, SEQ ID NO: 65, SEQ ID NO: 66, SEQ ID NO: 67, SEQ ID NO: 68, SEQ ID NO: 69, SEQ ID NO: 70, SEQ ID NO: 71, SEQ ID NO: 72, SEQ ID NO: 73, SEQ ID NO: 74, SEQ ID NO: 75, SEQ ID NO: 76, SEQ ID NO: 77, SEQ ID NO: 78, SEQ ID NO: 79, SEQ ID NO: 80, or SEQ ID NO: 81.

[0243] In some examples of any of the ABPCs described herein, the first antigen-binding domain includes a heavy chain variable domain comprising SEQ ID NO: 101, and a light chain variable domain comprising SEQ ID NO: 2, SEQ ID NO: 51, SEQ ID NO: 52, SEQ ID NO: 53, SEQ ID NO: 54, SEQ ID NO: 55, SEQ ID NO: 56, SEQ ID NO: 57, SEQ ID NO: 58, SEQ ID NO: 59, SEQ ID NO: 60, SEQ ID NO: 61, SEQ ID NO: 62, SEQ ID NO: 63, SEQ ID NO: 64, SEQ ID NO: 65, SEQ ID NO: 66, SEQ ID NO: 67, SEQ ID NO: 68, SEQ ID NO: 69, SEQ ID NO: 70, SEQ ID NO: 71, SEQ ID NO: 72, SEQ ID NO: 73, SEQ ID NO: 74, SEQ ID NO: 75, SEQ ID NO: 76, SEQ ID NO: 77, SEQ ID NO: 78, SEQ ID NO: 79, SEQ ID NO: 80, or SEQ ID NO: 81.

[0244] In some examples of any of the ABPCs described herein, the first antigen-binding domain includes a heavy chain variable domain comprising SEQ ID NO: 102, and a light chain variable domain comprising SEQ ID NO: 2, SEQ ID NO: 51, SEQ ID NO: 52, SEQ ID NO: 53, SEQ ID NO: 54, SEQ ID NO: 55, SEQ ID NO: 56, SEQ ID NO: 57, SEQ ID NO: 58, SEQ ID NO: 59, SEQ ID NO: 60, SEQ ID NO: 61, SEQ ID NO: 62, SEQ ID NO: 63, SEQ ID NO: 64, SEQ ID NO: 65, SEQ ID NO: 66, SEQ ID NO: 67, SEQ ID NO: 68, SEQ ID NO: 69, SEQ ID NO: 70, SEQ ID NO: 71, SEQ ID NO: 72, SEQ ID NO: 73, SEQ ID NO: 74, SEQ ID NO: 75, SEQ ID NO: 76, SEQ ID NO: 77, SEQ ID NO: 78, SEQ ID NO: 79, SEQ ID NO: 80, or SEQ ID NO: 81.

[0245] In some examples of any of the ABPCs described herein, the first antigen-binding domain includes a heavy chain variable domain comprising SEQ ID NO: 103, and a light chain variable domain comprising SEQ ID NO: 2, SEQ ID NO: 51, SEQ ID NO: 52, SEQ ID NO: 53, SEQ ID NO: 54, SEQ ID NO: 55, SEQ ID NO: 56, SEQ ID NO: 57, SEQ ID NO: 58, SEQ ID NO: 59, SEQ ID NO: 60, SEQ ID NO: 61, SEQ ID NO: 62, SEQ ID NO: 63, SEQ ID NO: 64, SEQ ID NO: 65, SEQ ID NO: 66, SEQ ID NO: 67, SEQ ID NO: 68, SEQ ID NO: 69, SEQ ID NO: 70, SEQ ID NO: 71, SEQ ID NO: 72, SEQ ID NO: 73, SEQ ID NO: 74, SEQ ID NO: 75, SEQ ID NO: 76, SEQ ID NO: 77, SEQ ID NO: 78, SEQ ID NO: 79, SEQ ID NO: 80, or SEQ ID NO: 81.

[0246] In some examples of any of the ABPCs described herein, the first antigen-binding domain includes a heavy chain variable domain comprising SEQ ID NO: 104, and a light chain variable domain comprising SEQ ID NO: 2, SEQ ID NO: 51, SEQ ID NO: 52, SEQ ID NO: 53, SEQ ID NO: 54, SEQ ID NO: 55, SEQ ID NO: 56, SEQ ID NO: 57, SEQ ID NO: 58, SEQ ID NO: 59, SEQ ID NO: 60, SEQ ID NO: 61, SEQ ID NO: 62, SEQ ID NO: 63, SEQ ID NO: 64, SEQ ID NO: 65, SEQ ID NO: 66, SEQ ID NO: 67, SEQ ID NO: 68, SEQ ID NO: 69, SEQ ID NO: 70, SEQ ID NO: 71, SEQ ID NO: 72, SEQ ID NO: 73, SEQ ID NO: 74, SEQ ID NO: 75, SEQ ID NO: 76, SEQ ID NO: 77, SEQ ID NO: 78, SEQ ID NO: 79, SEQ ID NO: 80, or SEQ ID NO: 81.

[0247] In some examples of any of the ABPCs described herein, the first antigen-binding domain includes a heavy chain variable domain comprising SEQ ID NO: 105, and a light chain variable domain comprising SEQ ID NO: 2, SEQ ID NO: 51, SEQ ID NO: 52, SEQ ID NO: 53, SEQ ID NO: 54, SEQ ID NO: 55, SEQ ID NO: 56, SEQ ID NO: 57, SEQ ID NO: 58, SEQ ID NO: 59, SEQ ID NO: 60, SEQ ID NO: 61, SEQ ID NO: 62, SEQ ID NO: 63, SEQ ID NO: 64, SEQ ID NO: 65, SEQ ID NO: 66, SEQ ID NO: 67, SEQ ID NO: 68, SEQ ID NO: 69, SEQ ID NO: 70, SEQ ID NO: 71, SEQ ID NO: 72, SEQ ID NO: 73, SEQ ID NO: 74, SEQ ID NO: 75, SEQ ID NO: 76, SEQ ID NO: 77, SEQ ID NO: 78, SEQ ID NO: 79, SEQ ID NO: 80, or SEQ ID NO: 81.

[0248] In some examples of any of the ABPCs described herein, the first antigen-binding domain includes a heavy chain variable domain comprising SEQ ID NO: 106, and a light chain variable domain comprising SEQ ID NO: 2, SEQ ID NO: 51, SEQ ID NO: 52, SEQ ID NO: 53, SEQ ID NO: 54, SEQ ID NO: 55, SEQ ID NO: 56, SEQ ID NO: 57, SEQ ID NO: 58, SEQ ID NO: 59, SEQ ID NO: 60, SEQ ID NO: 61, SEQ ID NO: 62, SEQ ID NO: 63, SEQ ID NO: 64, SEQ ID NO: 65, SEQ ID NO: 66, SEQ ID NO: 67, SEQ ID NO: 68, SEQ ID NO: 69, SEQ ID NO: 70, SEQ ID NO: 71, SEQ ID NO: 72, SEQ ID NO: 73, SEQ ID NO: 74, SEQ ID NO: 75, SEQ ID NO: 76, SEQ ID NO: 77, SEQ ID NO: 78, SEQ ID NO: 79, SEQ ID NO: 80, or SEQ ID NO: 81.

[0249] In some examples of any of the ABPCs described herein, the first antigen-binding domain includes a heavy chain variable domain comprising SEQ ID NO: 107, and a light chain variable domain comprising SEQ ID NO: 2, SEQ ID NO: 51, SEQ ID NO: 52, SEQ ID NO: 53, SEQ ID NO: 54, SEQ ID NO: 55, SEQ ID NO: 56, SEQ ID NO: 57, SEQ ID NO: 58, SEQ ID NO: 59, SEQ ID NO: 60, SEQ ID NO: 61, SEQ ID NO: 62, SEQ ID NO: 63, SEQ ID NO: 64, SEQ ID NO: 65, SEQ ID NO: 66, SEQ ID NO: 67, SEQ ID NO: 68, SEQ ID NO: 69, SEQ ID NO: 70, SEQ ID NO: 71, SEQ ID NO: 72, SEQ ID NO: 73, SEQ ID NO: 74, SEQ ID NO: 75, SEQ ID NO: 76, SEQ ID NO: 77, SEQ ID NO: 78, SEQ ID NO: 79, SEQ ID NO: 80, or SEQ ID NO: 81.

[0250] In some examples of any of the ABPCs described herein, the first antigen-binding domain includes a heavy chain variable domain comprising SEQ ID NO: 108, and a light chain variable domain comprising SEQ ID NO: 2, SEQ ID NO: 51, SEQ ID NO: 52, SEQ ID NO: 53, SEQ ID NO: 54, SEQ ID NO: 55, SEQ ID NO: 56, SEQ ID NO: 57, SEQ ID NO: 58, SEQ ID NO: 59, SEQ ID NO: 60, SEQ ID NO: 61, SEQ ID NO: 62, SEQ ID NO: 63, SEQ ID NO: 64, SEQ ID NO: 65, SEQ ID NO: 66, SEQ ID NO: 67, SEQ ID NO: 68, SEQ ID NO: 69, SEQ ID NO: 70, SEQ ID NO: 71, SEQ ID NO: 72, SEQ ID NO: 73, SEQ ID NO: 74, SEQ ID NO: 75, SEQ ID NO: 76, SEQ ID NO: 77, SEQ ID NO: 78, SEQ ID NO: 79, SEQ ID NO: 80, or SEQ ID NO: 81.

[0251] In some examples of any of the ABPCs described herein, the first antigen-binding domain includes a heavy chain variable domain comprising SEQ ID NO: 109, and a light chain variable domain comprising SEQ ID NO: 2, SEQ ID NO: 51, SEQ ID NO: 52, SEQ ID NO: 53, SEQ ID NO: 54, SEQ ID NO: 55, SEQ ID NO: 56, SEQ ID NO: 57, SEQ ID NO: 58, SEQ ID NO: 59, SEQ ID NO: 60, SEQ ID NO: 61, SEQ ID NO: 62, SEQ ID NO: 63, SEQ ID NO: 64, SEQ ID NO: 65, SEQ ID NO: 66, SEQ ID NO: 67, SEQ ID NO: 68, SEQ ID NO: 69, SEQ ID NO: 70, SEQ ID NO: 71, SEQ ID NO: 72, SEQ ID NO: 73, SEQ ID NO: 74, SEQ ID NO: 75, SEQ ID NO: 76, SEQ ID NO: 77, SEQ ID NO: 78, SEQ ID NO: 79, SEQ ID NO: 80, or SEQ ID NO: 81.

[0252] In some examples of any of the ABPCs described herein, the first antigen-binding domain includes a heavy chain variable domain comprising SEQ ID NO: 110, and a light chain variable domain comprising SEQ ID NO: 2, SEQ ID NO: 51, SEQ ID NO: 52, SEQ ID NO: 53, SEQ ID NO: 54, SEQ ID NO: 55, SEQ ID NO: 56, SEQ ID NO: 57, SEQ ID NO: 58, SEQ ID NO: 59, SEQ ID NO: 60, SEQ ID NO: 61, SEQ ID NO: 62, SEQ ID NO: 63, SEQ ID NO: 64, SEQ ID NO: 65, SEQ ID NO: 66, SEQ ID NO: 67, SEQ ID NO: 68, SEQ ID NO: 69, SEQ ID NO: 70, SEQ ID NO: 71, SEQ ID NO: 72, SEQ ID NO: 73, SEQ ID NO: 74, SEQ ID NO: 75, SEQ ID NO: 76, SEQ ID NO: 77, SEQ ID NO: 78, SEQ ID NO: 79, SEQ ID NO: 80, or SEQ ID NO: 81.

[0253] In some examples of any of the ABPCs described herein, the first antigen-binding domain includes a heavy chain variable domain comprising SEQ ID NO: 111, and a light chain variable domain comprising SEQ ID NO: 2, SEQ ID NO: 51, SEQ ID NO: 52, SEQ ID NO: 53, SEQ ID NO: 54, SEQ ID NO: 55, SEQ ID NO: 56, SEQ ID NO: 57, SEQ ID NO: 58, SEQ ID NO: 59, SEQ ID NO: 60, SEQ ID NO: 61, SEQ ID NO: 62, SEQ ID NO: 63, SEQ ID NO: 64, SEQ ID NO: 65, SEQ ID NO: 66, SEQ ID NO: 67, SEQ ID NO: 68, SEQ ID NO: 69, SEQ ID NO: 70, SEQ ID NO: 71, SEQ ID NO: 72, SEQ ID NO: 73, SEQ ID NO: 74, SEQ ID NO: 75, SEQ ID NO: 76, SEQ ID NO: 77, SEQ ID NO: 78, SEQ ID NO: 79, SEQ ID NO: 80, or SEQ ID NO: 81.

[0254] In some examples of any of the ABPCs described herein, the first antigen-binding domain includes a heavy chain variable domain comprising SEQ ID NO: 112, and a light chain variable domain comprising SEQ ID NO: 2, SEQ ID NO: 51, SEQ ID NO: 52, SEQ ID NO: 53, SEQ ID NO: 54, SEQ ID NO: 55, SEQ ID NO: 56, SEQ ID NO: 57, SEQ ID NO: 58, SEQ ID NO: 59, SEQ ID NO: 60, SEQ ID NO: 61, SEQ ID NO: 62, SEQ ID NO: 63, SEQ ID NO: 64, SEQ ID NO: 65, SEQ ID NO: 66, SEQ ID NO: 67, SEQ ID NO: 68, SEQ ID NO: 69, SEQ ID NO: 70, SEQ ID NO: 71, SEQ ID NO: 72, SEQ ID NO: 73, SEQ ID NO: 74, SEQ ID NO: 75, SEQ ID NO: 76, SEQ ID NO: 77, SEQ ID NO: 78, SEQ ID NO: 79, SEQ ID NO: 80, or SEQ ID NO: 81.

[0255] In some examples of any of the ABPCs described herein, the first antigen-binding domain includes a heavy chain variable domain comprising SEQ ID NO: 113, and a light chain variable domain comprising SEQ ID NO: 2, SEQ ID NO: 51, SEQ ID NO: 52, SEQ ID NO: 53, SEQ ID NO: 54, SEQ ID NO: 55, SEQ ID NO: 56, SEQ ID NO: 57, SEQ ID NO: 58, SEQ ID NO: 59, SEQ ID NO: 60, SEQ ID NO: 61, SEQ ID NO: 62, SEQ ID NO: 63, SEQ ID NO: 64, SEQ ID NO: 65, SEQ ID NO: 66, SEQ ID NO: 67, SEQ ID NO: 68, SEQ ID NO: 69, SEQ ID NO: 70, SEQ ID NO: 71, SEQ ID NO: 72, SEQ ID NO: 73, SEQ ID NO: 74, SEQ ID NO: 75, SEQ ID NO: 76, SEQ ID NO: 77, SEQ ID NO: 78, SEQ ID NO: 79, SEQ ID NO: 80, or SEQ ID NO: 81.

[0256] In some examples of any of the ABPCs described herein, the first antigen-binding domain includes a heavy chain variable domain comprising SEQ ID NO: 114, and a light chain variable domain comprising SEQ ID NO: 2, SEQ ID NO: 51, SEQ ID NO: 52, SEQ ID NO: 53, SEQ ID NO: 54, SEQ ID NO: 55, SEQ ID NO: 56, SEQ ID NO: 57, SEQ ID NO: 58, SEQ ID NO: 59, SEQ ID NO: 60, SEQ ID NO: 61, SEQ ID NO: 62, SEQ ID NO: 63, SEQ ID NO: 64, SEQ ID NO: 65, SEQ ID NO: 66, SEQ ID NO: 67, SEQ ID NO: 68, SEQ ID NO: 69, SEQ ID NO: 70, SEQ ID NO: 71, SEQ ID NO: 72, SEQ ID NO: 73, SEQ ID NO: 74, SEQ ID NO: 75, SEQ ID NO: 76, SEQ ID NO: 77, SEQ ID NO: 78, SEQ ID NO: 79, SEQ ID NO: 80, or SEQ ID NO: 81.

[0257] In some examples of any of the ABPCs described herein, the first antigen-binding domain includes a heavy chain variable domain comprising SEQ ID NO: 115, and a light chain variable domain comprising SEQ ID NO: 2, SEQ ID NO: 51, SEQ ID NO: 52, SEQ ID NO: 53, SEQ ID NO: 54, SEQ ID NO: 55, SEQ ID NO: 56, SEQ ID NO: 57, SEQ ID NO: 58, SEQ ID NO: 59, SEQ ID NO: 60, SEQ ID NO: 61, SEQ ID NO: 62, SEQ ID NO: 63, SEQ ID NO: 64, SEQ ID NO: 65, SEQ ID NO: 66, SEQ ID NO: 67, SEQ ID NO: 68, SEQ ID NO: 69, SEQ ID NO: 70, SEQ ID NO: 71, SEQ ID NO: 72, SEQ ID NO: 73, SEQ ID NO: 74, SEQ ID NO: 75, SEQ ID NO: 76, SEQ ID NO: 77, SEQ ID NO: 78, SEQ ID NO: 79, SEQ ID NO: 80, or SEQ ID NO: 81.

[0258] In some examples of any of the ABPCs described herein, the first antigen-binding domain includes a heavy chain variable domain comprising SEQ ID NO: 116, and a light chain variable domain comprising SEQ ID NO: 2, SEQ ID NO: 51, SEQ ID NO: 52, SEQ ID NO: 53, SEQ ID NO: 54, SEQ ID NO: 55, SEQ ID NO: 56, SEQ ID NO: 57, SEQ ID NO: 58, SEQ ID NO: 59, SEQ ID NO: 60, SEQ ID NO: 61, SEQ ID NO: 62, SEQ ID NO: 63, SEQ ID NO: 64, SEQ ID NO: 65, SEQ ID NO: 66, SEQ ID NO: 67, SEQ ID NO: 68, SEQ ID NO: 69, SEQ ID NO: 70, SEQ ID NO: 71, SEQ ID NO: 72, SEQ ID NO: 73, SEQ ID NO: 74, SEQ ID NO: 75, SEQ ID NO: 76, SEQ ID NO: 77, SEQ ID NO: 78, SEQ ID NO: 79, SEQ ID NO: 80, or SEQ ID NO: 81.

[0259] In some examples of any of the ABPCs described herein, the first antigen-binding domain includes a heavy chain variable domain comprising SEQ ID NO: 117, and a light chain variable domain comprising SEQ ID NO: 2, SEQ ID NO: 51, SEQ ID NO: 52, SEQ ID NO: 53, SEQ ID NO: 54, SEQ ID NO: 55, SEQ ID NO: 56, SEQ ID NO: 57, SEQ ID NO: 58, SEQ ID NO: 59, SEQ ID NO: 60, SEQ ID NO: 61, SEQ ID NO: 62, SEQ ID NO: 63, SEQ ID NO: 64, SEQ ID NO: 65, SEQ ID NO: 66, SEQ ID NO: 67, SEQ ID NO: 68, SEQ ID NO: 69, SEQ ID NO: 70, SEQ ID NO: 71, SEQ ID NO: 72, SEQ ID NO: 73, SEQ ID NO: 74, SEQ ID NO: 75, SEQ ID NO: 76, SEQ ID NO: 77, SEQ ID NO: 78, SEQ ID NO: 79, SEQ ID NO: 80, or SEQ ID NO: 81.

[0260] In some examples of any of the ABPCs described herein, the first antigen-binding domain includes a heavy chain variable domain comprising SEQ ID NO: 118, and a light chain variable domain comprising SEQ ID NO: 2, SEQ ID NO: 51, SEQ ID NO: 52, SEQ ID NO: 53, SEQ ID NO: 54, SEQ ID NO: 55, SEQ ID NO: 56, SEQ ID NO: 57, SEQ ID NO: 58, SEQ ID NO: 59, SEQ ID NO: 60, SEQ ID NO: 61, SEQ ID NO: 62, SEQ ID NO: 63, SEQ ID NO: 64, SEQ ID NO: 65, SEQ ID NO: 66, SEQ ID NO: 67, SEQ ID NO: 68, SEQ ID NO: 69, SEQ ID NO: 70, SEQ ID NO: 71, SEQ ID NO: 72, SEQ ID NO: 73, SEQ ID NO: 74, SEQ ID NO: 75, SEQ ID NO: 76, SEQ ID NO: 77, SEQ ID NO: 78, SEQ ID NO: 79, SEQ ID NO: 80, or SEQ ID NO: 81.

[0261] In some examples of any of the ABPCs described herein, the first antigen-binding domain includes a heavy chain variable domain comprising SEQ ID NO: 119, and a light chain variable domain comprising SEQ ID NO: 2, SEQ ID NO: 51, SEQ ID NO: 52, SEQ ID NO: 53, SEQ ID NO: 54, SEQ ID NO: 55, SEQ ID NO: 56, SEQ ID NO: 57, SEQ ID NO: 58, SEQ ID NO: 59, SEQ ID NO: 60, SEQ ID NO: 61, SEQ ID NO: 62, SEQ ID NO: 63, SEQ ID NO: 64, SEQ ID NO: 65, SEQ ID NO: 66, SEQ ID NO: 67, SEQ ID NO: 68, SEQ ID NO: 69, SEQ ID NO: 70, SEQ ID NO: 71, SEQ ID NO: 72, SEQ ID NO: 73, SEQ ID NO: 74, SEQ ID NO: 75, SEQ ID NO: 76, SEQ ID NO: 77, SEQ ID NO: 78, SEQ ID NO: 79, SEQ ID NO: 80, or SEQ ID NO: 81.

[0262] In some examples of any of the ABPCs described herein, the first antigen-binding domain includes a heavy chain variable domain comprising SEQ ID NO: 120, and a light chain variable domain comprising SEQ ID NO: 2, SEQ ID NO: 51, SEQ ID NO: 52, SEQ ID NO: 53, SEQ ID NO: 54, SEQ ID NO: 55, SEQ ID NO: 56, SEQ ID NO: 57, SEQ ID NO: 58, SEQ ID NO: 59, SEQ ID NO: 60, SEQ ID NO: 61, SEQ ID NO: 62, SEQ ID NO: 63, SEQ ID NO: 64, SEQ ID NO: 65, SEQ ID NO: 66, SEQ ID NO: 67, SEQ ID NO: 68, SEQ ID NO: 69, SEQ ID NO: 70, SEQ ID NO: 71, SEQ ID NO: 72, SEQ ID NO: 73, SEQ ID NO: 74, SEQ ID NO: 75, SEQ ID NO: 76, SEQ ID NO: 77, SEQ ID NO: 78, SEQ ID NO: 79, SEQ ID NO: 80, or SEQ ID NO: 81.

[0263] In some examples of any of the ABPCs described herein, the first antigen-binding domain includes a heavy chain variable domain comprising SEQ ID NO: 121, and a light chain variable domain comprising SEQ ID NO: 2, SEQ ID NO: 51, SEQ ID NO: 52, SEQ ID NO: 53, SEQ ID NO: 54, SEQ ID NO: 55, SEQ ID NO: 56, SEQ ID NO: 57, SEQ ID NO: 58, SEQ ID NO: 59, SEQ ID NO: 60, SEQ ID NO: 61, SEQ ID NO: 62, SEQ ID NO: 63, SEQ ID NO: 64, SEQ ID NO: 65, SEQ ID NO: 66, SEQ ID NO: 67, SEQ ID NO: 68, SEQ ID NO: 69, SEQ ID NO: 70, SEQ ID NO: 71, SEQ ID NO: 72, SEQ ID NO: 73, SEQ ID NO: 74, SEQ ID NO: 75, SEQ ID NO: 76, SEQ ID NO: 77, SEQ ID NO: 78, SEQ ID NO: 79, SEQ ID NO: 80, or SEQ ID NO: 81.

[0264] In some examples of any of the ABPCs described herein, the first antigen-binding domain includes a heavy chain variable domain comprising SEQ ID NO: 122, and a light chain variable domain comprising SEQ ID NO: 2, SEQ ID NO: 51, SEQ ID NO: 52, SEQ ID NO: 53, SEQ ID NO: 54, SEQ ID NO: 55, SEQ ID NO: 56, SEQ ID NO: 57, SEQ ID NO: 58, SEQ ID NO: 59, SEQ ID NO: 60, SEQ ID NO: 61, SEQ ID NO: 62, SEQ ID NO: 63, SEQ ID NO: 64, SEQ ID NO: 65, SEQ ID NO: 66, SEQ ID NO: 67, SEQ ID NO: 68, SEQ ID NO: 69, SEQ ID NO: 70, SEQ ID NO: 71, SEQ ID NO: 72, SEQ ID NO: 73, SEQ ID NO: 74, SEQ ID NO: 75, SEQ ID NO: 76, SEQ ID NO: 77, SEQ ID NO: 78, SEQ ID NO: 79, SEQ ID NO: 80, or SEQ ID NO: 81.

[0265] In some examples of any of the ABPCs described herein, the first antigen-binding domain includes a heavy chain variable domain comprising SEQ ID NO: 123, and a light chain variable domain comprising SEQ ID NO: 2, SEQ ID NO: 51, SEQ ID NO: 52, SEQ ID NO: 53, SEQ ID NO: 54, SEQ ID NO: 55, SEQ ID NO: 56, SEQ ID NO: 57, SEQ ID NO: 58, SEQ ID NO: 59, SEQ ID NO: 60, SEQ ID NO: 61, SEQ ID NO: 62, SEQ ID NO: 63, SEQ ID NO: 64, SEQ ID NO: 65, SEQ ID NO: 66, SEQ ID NO: 67, SEQ ID NO: 68, SEQ ID NO: 69, SEQ ID NO: 70, SEQ ID NO: 71, SEQ ID NO: 72, SEQ ID NO: 73, SEQ ID NO: 74, SEQ ID NO: 75, SEQ ID NO: 76, SEQ ID NO: 77, SEQ ID NO: 78, SEQ ID NO: 79, SEQ ID NO: 80, or SEQ ID NO: 81.

[0266] In some examples of any of the ABPCs described herein, the first antigen-binding domain includes a heavy chain variable domain comprising SEQ ID NO: 124, and a light chain variable domain comprising SEQ ID NO: 2, SEQ ID NO: 51, SEQ ID NO: 52, SEQ ID NO: 53, SEQ ID NO: 54, SEQ ID NO: 55, SEQ ID NO: 56, SEQ ID NO: 57, SEQ ID NO: 58, SEQ ID NO: 59, SEQ ID NO: 60, SEQ ID NO: 61, SEQ ID NO: 62, SEQ ID NO: 63, SEQ ID NO: 64, SEQ ID NO: 65, SEQ ID NO: 66, SEQ ID NO: 67, SEQ ID NO: 68, SEQ ID NO: 69, SEQ ID NO: 70, SEQ ID NO: 71, SEQ ID NO: 72, SEQ ID NO: 73, SEQ ID NO: 74, SEQ ID NO: 75, SEQ ID NO: 76, SEQ ID NO: 77, SEQ ID NO: 78, SEQ ID NO: 79, SEQ ID NO: 80, or SEQ ID NO: 81.

[0267] In some examples of any of the ABPCs described herein, the first antigen-binding domain includes a heavy chain variable domain comprising SEQ ID NO: 125, and a light chain variable domain comprising SEQ ID NO: 2, SEQ ID NO: 51, SEQ ID NO: 52, SEQ ID NO: 53, SEQ ID NO: 54, SEQ ID NO: 55, SEQ ID NO: 56, SEQ ID NO: 57, SEQ ID NO: 58, SEQ ID NO: 59, SEQ ID NO: 60, SEQ ID NO: 61, SEQ ID NO: 62, SEQ ID NO: 63, SEQ ID NO: 64, SEQ ID NO: 65, SEQ ID NO: 66, SEQ ID NO: 67, SEQ ID NO: 68, SEQ ID NO: 69, SEQ ID NO: 70, SEQ ID NO: 71, SEQ ID NO: 72, SEQ ID NO: 73, SEQ ID NO: 74, SEQ ID NO: 75, SEQ ID NO: 76, SEQ ID NO: 77, SEQ ID NO: 78, SEQ ID NO: 79, SEQ ID NO: 80, or SEQ ID NO: 81.

[0268] In some examples of any of the ABPCs described herein, the first antigen-binding domain includes a heavy chain variable domain comprising SEQ ID NO: 126, and a light chain variable domain comprising SEQ ID NO: 2, SEQ ID NO: 51, SEQ ID NO: 52, SEQ ID NO: 53, SEQ ID NO: 54, SEQ ID NO: 55, SEQ ID NO: 56, SEQ ID NO: 57, SEQ ID NO: 58, SEQ ID NO: 59, SEQ ID NO: 60, SEQ ID NO: 61, SEQ ID NO: 62, SEQ ID NO: 63, SEQ ID NO: 64, SEQ ID NO: 65, SEQ ID NO: 66, SEQ ID NO: 67, SEQ ID NO: 68, SEQ ID NO: 69, SEQ ID NO: 70, SEQ ID NO: 71, SEQ ID NO: 72, SEQ ID NO: 73, SEQ ID NO: 74, SEQ ID NO: 75, SEQ ID NO: 76, SEQ ID NO: 77, SEQ ID NO: 78, SEQ ID NO: 79, SEQ ID NO: 80, or SEQ ID NO: 81.

[0269] In some examples of any of the ABPCs described herein, the first antigen-binding domain includes a heavy chain variable domain comprising SEQ ID NO: 127, and a light chain variable domain comprising SEQ ID NO: 2, SEQ ID NO: 51, SEQ ID NO: 52, SEQ ID NO: 53, SEQ ID NO: 54, SEQ ID NO: 55, SEQ ID NO: 56, SEQ ID NO: 57, SEQ ID NO: 58, SEQ ID NO: 59, SEQ ID NO: 60, SEQ ID NO: 61, SEQ ID NO: 62, SEQ ID NO: 63, SEQ ID NO: 64, SEQ ID NO: 65, SEQ ID NO: 66, SEQ ID NO: 67, SEQ ID NO: 68, SEQ ID NO: 69, SEQ ID NO: 70, SEQ ID NO: 71, SEQ ID NO: 72, SEQ ID NO: 73, SEQ ID NO: 74, SEQ ID NO: 75, SEQ ID NO: 76, SEQ ID NO: 77, SEQ ID NO: 78, SEQ ID NO: 79, SEQ ID NO: 80, or SEQ ID NO: 81.

[0270] In some examples of any of the ABPCs described herein, the first antigen-binding domain includes a heavy chain variable domain comprising SEQ ID NO: 128, and a light chain variable domain comprising SEQ ID NO: 2, SEQ ID NO: 51, SEQ ID NO: 52, SEQ ID NO: 53, SEQ ID NO: 54, SEQ ID NO: 55, SEQ ID NO: 56, SEQ ID NO: 57, SEQ ID NO: 58, SEQ ID NO: 59, SEQ ID NO: 60, SEQ ID NO: 61, SEQ ID NO: 62, SEQ ID NO: 63, SEQ ID NO: 64, SEQ ID NO: 65, SEQ ID NO: 66, SEQ ID NO: 67, SEQ ID NO: 68, SEQ ID NO: 69, SEQ ID NO: 70, SEQ ID NO: 71, SEQ ID NO: 72, SEQ ID NO: 73, SEQ ID NO: 74, SEQ ID NO: 75, SEQ ID NO: 76, SEQ ID NO: 77, SEQ ID NO: 78, SEQ ID NO: 79, SEQ ID NO: 80, or SEQ ID NO: 81.

[0271] In some examples of any of the ABPCs described herein, the first antigen-binding domain includes a heavy chain variable domain comprising SEQ ID NO: 129, and a light chain variable domain comprising SEQ ID NO: 2, SEQ ID NO: 51, SEQ ID NO: 52, SEQ ID NO: 53, SEQ ID NO: 54, SEQ ID NO: 55, SEQ ID NO: 56, SEQ ID NO: 57, SEQ ID NO: 58, SEQ ID NO: 59, SEQ ID NO: 60, SEQ ID NO: 61, SEQ ID NO: 62, SEQ ID NO: 63, SEQ ID NO: 64, SEQ ID NO: 65, SEQ ID NO: 66, SEQ ID NO: 67, SEQ ID NO: 68, SEQ ID NO: 69, SEQ ID NO: 70, SEQ ID NO: 71, SEQ ID NO: 72, SEQ ID NO: 73, SEQ ID NO: 74, SEQ ID NO: 75, SEQ ID NO: 76, SEQ ID NO: 77, SEQ ID NO: 78, SEQ ID NO: 79, SEQ ID NO: 80, or SEQ ID NO: 81.

[0272] In some examples of any of the ABPCs described herein, the first antigen-binding domain includes a heavy chain variable domain comprising SEQ ID NO: 130, and a light chain variable domain comprising SEQ ID NO: 2, SEQ ID NO: 51, SEQ ID NO: 52, SEQ ID NO: 53, SEQ ID NO: 54, SEQ ID NO: 55, SEQ ID NO: 56, SEQ ID NO: 57, SEQ ID NO: 58, SEQ ID NO: 59, SEQ ID NO: 60, SEQ ID NO: 61, SEQ ID NO: 62, SEQ ID NO: 63, SEQ ID NO: 64, SEQ ID NO: 65, SEQ ID NO: 66, SEQ ID NO: 67, SEQ ID NO: 68, SEQ ID NO: 69, SEQ ID NO: 70, SEQ ID NO: 71, SEQ ID NO: 72, SEQ ID NO: 73, SEQ ID NO: 74, SEQ ID NO: 75, SEQ ID NO: 76, SEQ ID NO: 77, SEQ ID NO: 78, SEQ ID NO: 79, SEQ ID NO: 80, or SEQ ID NO: 81.

[0273] In some examples of any of the ABPCs described herein, the first antigen-binding domain includes a light chain variable domain comprising SEQ ID NO: 131, SEQ ID NO: 132, SEQ ID NO: 133, SEQ ID NO: 134, SEQ ID NO: 135, SEQ ID NO: 136, SEQ ID NO: 137, SEQ ID NO: 138, SEQ ID NO: 139, SEQ ID NO: 140, SEQ ID NO: 141, SEQ ID NO: 142, SEQ ID NO: 143, SEQ ID NO: 144, or SEQ ID NO: 145.

[0274] In some examples of any of the ABPCs described herein, the first antigen-binding domain includes a light chain variable domain comprising SEQ ID NO: 131, and a heavy chain variable domain comprising SEQ ID NO: 1, SEQ ID NO: 13, SEQ ID NO: 14, SEQ ID NO: 15, SEQ ID NO: 16, SEQ ID NO: 17, SEQ ID NO: 18, SEQ ID NO: 19, SEQ ID NO: 20, SEQ ID NO: 21, SEQ ID NO: 22, SEQ ID NO: 23, SEQ ID NO: 24, SEQ ID NO: 25, SEQ ID NO: 26, SEQ ID NO: 27, SEQ ID NO: 28, SEQ ID NO: 29, SEQ ID NO: 30, SEQ ID NO: 31, SEQ ID NO: 32, SEQ ID NO: 33, SEQ ID NO: 34, SEQ ID NO: 35, SEQ ID NO: 36, SEQ ID NO: 37, SEQ ID NO: 38, SEQ ID NO: 39, SEQ ID NO: 40, SEQ ID NO: 41, SEQ ID NO: 42, SEQ ID NO: 43, SEQ ID NO: 44, SEQ ID NO: 45, SEQ ID NO: 46, SEQ ID NO: 47, SEQ ID NO: 48, SEQ ID NO: 49, SEQ ID NO: 50, SEQ ID NO: 82, SEQ ID NO: 83, SEQ ID NO: 84, SEQ ID NO: 85, SEQ ID NO: 86, SEQ ID NO: 87, SEQ ID NO: 88, SEQ ID NO: 89, SEQ ID NO: 90, SEQ ID NO: 91, SEQ ID NO: 92, SEQ ID NO: 93, SEQ ID NO: 94, SEQ ID NO: 95, SEQ ID NO: 96, SEQ ID NO: 97, SEQ ID NO: 98, SEQ ID NO: 99, SEQ ID NO: 100, SEQ ID NO: 101, SEQ ID NO: 102, SEQ ID NO: 103, SEQ ID NO: 104, SEQ ID NO: 105, SEQ ID NO: 106, SEQ ID NO: 107, SEQ ID NO: 108, SEQ ID NO: 109, SEQ ID NO: 110, SEQ ID NO: 111, SEQ ID NO: 112, SEQ ID NO: 113, SEQ ID NO: 114, SEQ ID NO: 115, SEQ ID NO: 116, SEQ ID NO: 117, SEQ ID NO: 118, SEQ ID NO: 119, SEQ ID NO: 120, SEQ ID NO: 121, SEQ ID NO: 122, SEQ ID NO: 123, SEQ ID NO: 124, SEQ ID NO: 125, SEQ ID NO: 126, SEQ ID NO: 127, SEQ ID NO: 128, SEQ ID NO: 129, or SEQ ID NO: 130.

[0275] In some examples of any of the ABPCs described herein, the first antigen-binding domain includes a light chain variable domain comprising SEQ ID NO: 134, and a heavy chain variable domain comprising SEQ ID NO: 1, SEQ ID NO: 13, SEQ ID NO: 14, SEQ ID NO: 15, SEQ ID NO: 16, SEQ ID NO: 17, SEQ ID NO: 18, SEQ ID NO: 19, SEQ ID NO: 20, SEQ ID NO: 21, SEQ ID NO: 22, SEQ ID NO: 23, SEQ ID NO: 24, SEQ ID NO: 25, SEQ ID NO: 26, SEQ ID NO: 27, SEQ ID NO: 28, SEQ ID NO: 29, SEQ ID NO: 30, SEQ ID NO: 31, SEQ ID NO: 32, SEQ ID NO: 33, SEQ ID NO: 34, SEQ ID NO: 35, SEQ ID NO: 36, SEQ ID NO: 37, SEQ ID NO: 38, SEQ ID NO: 39, SEQ ID NO: 40, SEQ ID NO: 41, SEQ ID NO: 42, SEQ ID NO: 43, SEQ ID NO: 44, SEQ ID NO: 45, SEQ ID NO: 46, SEQ ID NO: 47, SEQ ID NO: 48, SEQ ID NO: 49, SEQ ID NO: 50, SEQ ID NO: 82, SEQ ID NO: 83, SEQ ID NO: 84, SEQ ID NO: 85, SEQ ID NO: 86, SEQ ID NO: 87, SEQ ID NO: 88, SEQ ID NO: 89, SEQ ID NO: 90, SEQ ID NO: 91, SEQ ID NO: 92, SEQ ID NO: 93, SEQ ID NO: 94, SEQ ID NO: 95, SEQ ID NO: 96, SEQ ID NO: 97, SEQ ID NO: 98, SEQ ID NO: 99, SEQ ID NO: 100, SEQ ID NO: 101, SEQ ID NO: 102, SEQ ID NO: 103, SEQ ID NO: 104, SEQ ID NO: 105, SEQ ID NO: 106, SEQ ID NO: 107, SEQ ID NO: 108, SEQ ID NO: 109, SEQ ID NO: 110, SEQ ID NO: 111, SEQ ID NO: 112, SEQ ID NO: 113, SEQ ID NO: 114, SEQ ID NO: 115, SEQ ID NO: 116, SEQ ID NO: 117, SEQ ID NO: 118, SEQ ID NO: 119, SEQ ID NO: 120, SEQ ID NO: 121, SEQ ID NO: 122, SEQ ID NO: 123, SEQ ID NO: 124, SEQ ID NO: 125, SEQ ID NO: 126, SEQ ID NO: 127, SEQ ID NO: 128, SEQ ID NO: 129, or SEQ ID NO: 130.

[0276] In some examples of any of the ABPCs described herein, the first antigen-binding domain includes a light chain variable domain comprising SEQ ID NO: 133, and a heavy chain variable domain comprising SEQ ID NO: 1, SEQ ID NO: 13, SEQ ID NO: 14, SEQ ID NO: 15, SEQ ID NO: 16, SEQ ID NO: 17, SEQ ID NO: 18, SEQ ID NO: 19, SEQ ID NO: 20, SEQ ID NO: 21, SEQ ID NO: 22, SEQ ID NO: 23, SEQ ID NO: 24, SEQ ID NO: 25, SEQ ID NO: 26, SEQ ID NO: 27, SEQ ID NO: 28, SEQ ID NO: 29, SEQ ID NO: 30, SEQ ID NO: 31, SEQ ID NO: 32, SEQ ID NO: 33, SEQ ID NO: 34, SEQ ID NO: 35, SEQ ID NO: 36, SEQ ID NO: 37, SEQ ID NO: 38, SEQ ID NO: 39, SEQ ID NO: 40, SEQ ID NO: 41, SEQ ID NO: 42, SEQ ID NO: 43, SEQ ID NO: 44, SEQ ID NO: 45, SEQ ID NO: 46, SEQ ID NO: 47, SEQ ID NO: 48, SEQ ID NO: 49, SEQ ID NO: 50, SEQ ID NO: 82, SEQ ID NO: 83, SEQ ID NO: 84, SEQ ID NO: 85, SEQ ID NO: 86, SEQ ID NO: 87, SEQ ID NO: 88, SEQ ID NO: 89, SEQ ID NO: 90, SEQ ID NO: 91, SEQ ID NO: 92, SEQ ID NO: 93, SEQ ID NO: 94, SEQ ID NO: 95, SEQ ID NO: 96, SEQ ID NO: 97, SEQ ID NO: 98, SEQ ID NO: 99, SEQ ID NO: 100, SEQ ID NO: 101, SEQ ID NO: 102, SEQ ID NO: 103, SEQ ID NO: 104, SEQ ID NO: 105, SEQ ID NO: 106, SEQ ID NO: 107, SEQ ID NO: 108, SEQ ID NO: 109, SEQ ID NO: 110, SEQ ID NO: 111, SEQ ID NO: 112, SEQ ID NO: 113, SEQ ID NO: 114, SEQ ID NO: 115, SEQ ID NO: 116, SEQ ID NO: 117, SEQ ID NO: 118, SEQ ID NO: 119, SEQ ID NO: 120, SEQ ID NO: 121, SEQ ID NO: 122, SEQ ID NO: 123, SEQ ID NO: 124, SEQ ID NO: 125, SEQ ID NO: 126, SEQ ID NO: 127, SEQ ID NO: 128, SEQ ID NO: 129, or SEQ ID NO: 130.

[0277] In some examples of any of the ABPCs described herein, the first antigen-binding domain includes a light chain variable domain comprising SEQ ID NO: 134, and a heavy chain variable domain comprising SEQ ID NO: 1, SEQ ID NO: 13, SEQ ID NO: 14, SEQ ID NO: 15, SEQ ID NO: 16, SEQ ID NO: 17, SEQ ID NO: 18, SEQ ID NO: 19, SEQ ID NO: 20, SEQ ID NO: 21, SEQ ID NO: 22, SEQ ID NO: 23, SEQ ID NO: 24, SEQ ID NO: 25, SEQ ID NO: 26, SEQ ID NO: 27, SEQ ID NO: 28, SEQ ID NO: 29, SEQ ID NO: 30, SEQ ID NO: 31, SEQ ID NO: 32, SEQ ID NO: 33, SEQ ID NO: 34, SEQ ID NO: 35, SEQ ID NO: 36, SEQ ID NO: 37, SEQ ID NO: 38, SEQ ID NO: 39, SEQ ID NO: 40, SEQ ID NO: 41, SEQ ID NO: 42, SEQ ID NO: 43, SEQ ID NO: 44, SEQ ID NO: 45, SEQ ID NO: 46, SEQ ID NO: 47, SEQ ID NO: 48, SEQ ID NO: 49, SEQ ID NO: 50, SEQ ID NO: 82, SEQ ID NO: 83, SEQ ID NO: 84, SEQ ID NO: 85, SEQ ID NO: 86, SEQ ID NO: 87, SEQ ID NO: 88, SEQ ID NO: 89, SEQ ID NO: 90, SEQ ID NO: 91, SEQ ID NO: 92, SEQ ID NO: 93, SEQ ID NO: 94, SEQ ID NO: 95, SEQ ID NO: 96, SEQ ID NO: 97, SEQ ID NO: 98, SEQ ID NO: 99, SEQ ID NO: 100, SEQ ID NO: 101, SEQ ID NO: 102, SEQ ID NO: 103, SEQ ID NO: 104, SEQ ID NO: 105, SEQ ID NO: 106, SEQ ID NO: 107, SEQ ID NO: 108, SEQ ID NO: 109, SEQ ID NO: 110, SEQ ID NO: 111, SEQ ID NO: 112, SEQ ID NO: 113, SEQ ID NO: 114, SEQ ID NO: 115, SEQ ID NO: 116, SEQ ID NO: 117, SEQ ID NO: 118, SEQ ID NO: 119, SEQ ID NO: 120, SEQ ID NO: 121, SEQ ID NO: 122, SEQ ID NO: 123, SEQ ID NO: 124, SEQ ID NO: 125, SEQ ID NO: 126, SEQ ID NO: 127, SEQ ID NO: 128, SEQ ID NO: 129, or SEQ ID NO: 130.

[0278] In some examples of any of the ABPCs described herein, the first antigen-binding domain includes a light chain variable domain comprising SEQ ID NO: 135, and a heavy chain variable domain comprising SEQ ID NO: 1, SEQ ID NO: 13, SEQ ID NO: 14, SEQ ID NO: 15, SEQ ID NO: 16, SEQ ID NO: 17, SEQ ID NO: 18, SEQ ID NO: 19, SEQ ID NO: 20, SEQ ID NO: 21, SEQ ID NO: 22, SEQ ID NO: 23, SEQ ID NO: 24, SEQ ID NO: 25, SEQ ID NO: 26, SEQ ID NO: 27, SEQ ID NO: 28, SEQ ID NO: 29, SEQ ID NO: 30, SEQ ID NO: 31, SEQ ID NO: 32, SEQ ID NO: 33, SEQ ID NO: 34, SEQ ID NO: 35, SEQ ID NO: 36, SEQ ID NO: 37, SEQ ID NO: 38, SEQ ID NO: 39, SEQ ID NO: 40, SEQ ID NO: 41, SEQ ID NO: 42, SEQ ID NO: 43, SEQ ID NO: 44, SEQ ID NO: 45, SEQ ID NO: 46, SEQ ID NO: 47, SEQ ID NO: 48, SEQ ID NO: 49, SEQ ID NO: 50, SEQ ID NO: 82, SEQ ID NO: 83, SEQ ID NO: 84, SEQ ID NO: 85, SEQ ID NO: 86, SEQ ID NO: 87, SEQ ID NO: 88, SEQ ID NO: 89, SEQ ID NO: 90, SEQ ID NO: 91, SEQ ID NO: 92, SEQ ID NO: 93, SEQ ID NO: 94, SEQ ID NO: 95, SEQ ID NO: 96, SEQ ID NO: 97, SEQ ID NO: 98, SEQ ID NO: 99, SEQ ID NO: 100, SEQ ID NO: 101, SEQ ID NO: 102, SEQ ID NO: 103, SEQ ID NO: 104, SEQ ID NO: 105, SEQ ID NO: 106, SEQ ID NO: 107, SEQ ID NO: 108, SEQ ID NO: 109, SEQ ID NO: 110, SEQ ID NO: 111, SEQ ID NO: 112, SEQ ID NO: 113, SEQ ID NO: 114, SEQ ID NO: 115, SEQ ID NO: 116, SEQ ID NO: 117, SEQ ID NO: 118, SEQ ID NO: 119, SEQ ID NO: 120, SEQ ID NO: 121, SEQ ID NO: 122, SEQ ID NO: 123, SEQ ID NO: 124, SEQ ID NO: 125, SEQ ID NO: 126, SEQ ID NO: 127, SEQ ID NO: 128, SEQ ID NO: 129, or SEQ ID NO: 130.

[0279] In some examples of any of the ABPCs described herein, the first antigen-binding domain includes a light chain variable domain comprising SEQ ID NO: 136, and a heavy chain variable domain comprising SEQ ID NO: 1, SEQ ID NO: 13, SEQ ID NO: 14, SEQ ID NO: 15, SEQ ID NO: 16, SEQ ID NO: 17, SEQ ID NO: 18, SEQ ID NO: 19, SEQ ID NO: 20, SEQ ID NO: 21, SEQ ID NO: 22, SEQ ID NO: 23, SEQ ID NO: 24, SEQ ID NO: 25, SEQ ID NO: 26, SEQ ID NO: 27, SEQ ID NO: 28, SEQ ID NO: 29, SEQ ID NO: 30, SEQ ID NO: 31, SEQ ID NO: 32, SEQ ID NO: 33, SEQ ID NO: 34, SEQ ID NO: 35, SEQ ID NO: 36, SEQ ID NO: 37, SEQ ID NO: 38, SEQ ID NO: 39, SEQ ID NO: 40, SEQ ID NO: 41, SEQ ID NO: 42, SEQ ID NO: 43, SEQ ID NO: 44, SEQ ID NO: 45, SEQ ID NO: 46, SEQ ID NO: 47, SEQ ID NO: 48, SEQ ID NO: 49, SEQ ID NO: 50, SEQ ID NO: 82, SEQ ID NO: 83, SEQ ID NO: 84, SEQ ID NO: 85, SEQ ID NO: 86, SEQ ID NO: 87, SEQ ID NO: 88, SEQ ID NO: 89, SEQ ID NO: 90, SEQ ID NO: 91, SEQ ID NO: 92, SEQ ID NO: 93, SEQ ID NO: 94, SEQ ID NO: 95, SEQ ID NO: 96, SEQ ID NO: 97, SEQ ID NO: 98, SEQ ID NO: 99, SEQ ID NO: 100, SEQ ID NO: 101, SEQ ID NO: 102, SEQ ID NO: 103, SEQ ID NO: 104, SEQ ID NO: 105, SEQ ID NO: 106, SEQ ID NO: 107, SEQ ID NO: 108, SEQ ID NO: 109, SEQ ID NO: 110, SEQ ID NO: 111, SEQ ID NO: 112, SEQ ID NO: 113, SEQ ID NO: 114, SEQ ID NO: 115, SEQ ID NO: 116, SEQ ID NO: 117, SEQ ID NO: 118, SEQ ID NO: 119, SEQ ID NO: 120, SEQ ID NO: 121, SEQ ID NO: 122, SEQ ID NO: 123, SEQ ID NO: 124, SEQ ID NO: 125, SEQ ID NO: 126, SEQ ID NO: 127, SEQ ID NO: 128, SEQ ID NO: 129, or SEQ ID NO: 130.

[0280] In some examples of any of the ABPCs described herein, the first antigen-binding domain includes a light chain variable domain comprising SEQ ID NO: 139, and a heavy chain variable domain comprising SEQ ID NO: 1, SEQ ID NO: 13, SEQ ID NO: 14, SEQ ID NO: 15, SEQ ID NO: 16, SEQ ID NO: 17, SEQ ID NO: 18, SEQ ID NO: 19, SEQ ID NO: 20, SEQ ID NO: 21, SEQ ID NO: 22, SEQ ID NO: 23, SEQ ID NO: 24, SEQ ID NO: 25, SEQ ID NO: 26, SEQ ID NO: 27, SEQ ID NO: 28, SEQ ID NO: 29, SEQ ID NO: 30, SEQ ID NO: 31, SEQ ID NO: 32, SEQ ID NO: 33, SEQ ID NO: 34, SEQ ID NO: 35, SEQ ID NO: 36, SEQ ID NO: 37, SEQ ID NO: 38, SEQ ID NO: 39, SEQ ID NO: 40, SEQ ID NO: 41, SEQ ID NO: 42, SEQ ID NO: 43, SEQ ID NO: 44, SEQ ID NO: 45, SEQ ID NO: 46, SEQ ID NO: 47, SEQ ID NO: 48, SEQ ID NO: 49, SEQ ID NO: 50, SEQ ID NO: 82, SEQ ID NO: 83, SEQ ID NO: 84, SEQ ID NO: 85, SEQ ID NO: 86, SEQ ID NO: 87, SEQ ID NO: 88, SEQ ID NO: 89, SEQ ID NO: 90, SEQ ID NO: 91, SEQ ID NO: 92, SEQ ID NO: 93, SEQ ID NO: 94, SEQ ID NO: 95, SEQ ID NO: 96, SEQ ID NO: 97, SEQ ID NO: 98, SEQ ID NO: 99, SEQ ID NO: 100, SEQ ID NO: 101, SEQ ID NO: 102, SEQ ID NO: 103, SEQ ID NO: 104, SEQ ID NO: 105, SEQ ID NO: 106, SEQ ID NO: 107, SEQ ID NO: 108, SEQ ID NO: 109, SEQ ID NO: 110, SEQ ID NO: 111, SEQ ID NO: 112, SEQ ID NO: 113, SEQ ID NO: 114, SEQ ID NO: 115, SEQ ID NO: 116, SEQ ID NO: 117, SEQ ID NO: 118, SEQ ID NO: 119, SEQ ID NO: 120, SEQ ID NO: 121, SEQ ID NO: 122, SEQ ID NO: 123, SEQ ID NO: 124, SEQ ID NO: 125, SEQ ID NO: 126, SEQ ID NO: 127, SEQ ID NO: 128, SEQ ID NO: 129, or SEQ ID NO: 130.

[0281] In some examples of any of the ABPCs described herein, the first antigen-binding domain includes a light chain variable domain comprising SEQ ID NO: 138, and a heavy chain variable domain comprising SEQ ID NO: 1, SEQ ID NO: 13, SEQ ID NO: 14, SEQ ID NO: 15, SEQ ID NO: 16, SEQ ID NO: 17, SEQ ID NO: 18, SEQ ID NO: 19, SEQ ID NO: 20, SEQ ID NO: 21, SEQ ID NO: 22, SEQ ID NO: 23, SEQ ID NO: 24, SEQ ID NO: 25, SEQ ID NO: 26, SEQ ID NO: 27, SEQ ID NO: 28, SEQ ID NO: 29, SEQ ID NO: 30, SEQ ID NO: 31, SEQ ID NO: 32, SEQ ID NO: 33, SEQ ID NO: 34, SEQ ID NO: 35, SEQ ID NO: 36, SEQ ID NO: 37, SEQ ID NO: 38, SEQ ID NO: 39, SEQ ID NO: 40, SEQ ID NO: 41, SEQ ID NO: 42, SEQ ID NO: 43, SEQ ID NO: 44, SEQ ID NO: 45, SEQ ID NO: 46, SEQ ID NO: 47, SEQ ID NO: 48, SEQ ID NO: 49, SEQ ID NO: 50, SEQ ID NO: 82, SEQ ID NO: 83, SEQ ID NO: 84, SEQ ID NO: 85, SEQ ID NO: 86, SEQ ID NO: 87, SEQ ID NO: 88, SEQ ID NO: 89, SEQ ID NO: 90, SEQ ID NO: 91, SEQ ID NO: 92, SEQ ID NO: 93, SEQ ID NO: 94, SEQ ID NO: 95, SEQ ID NO: 96, SEQ ID NO: 97, SEQ ID NO: 98, SEQ ID NO: 99, SEQ ID NO: 100, SEQ ID NO: 101, SEQ ID NO: 102, SEQ ID NO: 103, SEQ ID NO: 104, SEQ ID NO: 105, SEQ ID NO: 106, SEQ ID NO: 107, SEQ ID NO: 108, SEQ ID NO: 109, SEQ ID NO: 110, SEQ ID NO: 111, SEQ ID NO: 112, SEQ ID NO: 113, SEQ ID NO: 114, SEQ ID NO: 115, SEQ ID NO: 116, SEQ ID NO: 117, SEQ ID NO: 118, SEQ ID NO: 119, SEQ ID NO: 120, SEQ ID NO: 121, SEQ ID NO: 122, SEQ ID NO: 123, SEQ ID NO: 124, SEQ ID NO: 125, SEQ ID NO: 126, SEQ ID NO: 127, SEQ ID NO: 128, SEQ ID NO: 129, or SEQ ID NO: 130.

[0282] In some examples of any of the ABPCs described herein, the first antigen-binding domain includes a light chain variable domain comprising SEQ ID NO: 139, and a heavy chain variable domain comprising SEQ ID NO: 1, SEQ ID NO: 13, SEQ ID NO: 14, SEQ ID NO: 15, SEQ ID NO: 16, SEQ ID NO: 17, SEQ ID NO: 18, SEQ ID NO: 19, SEQ ID NO: 20, SEQ ID NO: 21, SEQ ID NO: 22, SEQ ID NO: 23, SEQ ID NO: 24, SEQ ID NO: 25, SEQ ID NO: 26, SEQ ID NO: 27, SEQ ID NO: 28, SEQ ID NO: 29, SEQ ID NO: 30, SEQ ID NO: 31, SEQ ID NO: 32, SEQ ID NO: 33, SEQ ID NO: 34, SEQ ID NO: 35, SEQ ID NO: 36, SEQ ID NO: 37, SEQ ID NO: 38, SEQ ID NO: 39, SEQ ID NO: 40, SEQ ID NO: 41, SEQ ID NO: 42, SEQ ID NO: 43, SEQ ID NO: 44, SEQ ID NO: 45, SEQ ID NO: 46, SEQ ID NO: 47, SEQ ID NO: 48, SEQ ID NO: 49, SEQ ID NO: 50, SEQ ID NO: 82, SEQ ID NO: 83, SEQ ID NO: 84, SEQ ID NO: 85, SEQ ID NO: 86, SEQ ID NO: 87, SEQ ID NO: 88, SEQ ID NO: 89, SEQ ID NO: 90, SEQ ID NO: 91, SEQ ID NO: 92, SEQ ID NO: 93, SEQ ID NO: 94, SEQ ID NO: 95, SEQ ID NO: 96, SEQ ID NO: 97, SEQ ID NO: 98, SEQ ID NO: 99, SEQ ID NO: 100, SEQ ID NO: 101, SEQ ID NO: 102, SEQ ID NO: 103, SEQ ID NO: 104, SEQ ID NO: 105, SEQ ID NO: 106, SEQ ID NO: 107, SEQ ID NO: 108, SEQ ID NO: 109, SEQ ID NO: 110, SEQ ID NO: 111, SEQ ID NO: 112, SEQ ID NO: 113, SEQ ID NO: 114, SEQ ID NO: 115, SEQ ID NO: 116, SEQ ID NO: 117, SEQ ID NO: 118, SEQ ID NO: 119, SEQ ID NO: 120, SEQ ID NO: 121, SEQ ID NO: 122, SEQ ID NO: 123, SEQ ID NO: 124, SEQ ID NO: 125, SEQ ID NO: 126, SEQ ID NO: 127, SEQ ID NO: 128, SEQ ID NO: 129, or SEQ ID NO: 130.

[0283] In some examples of any of the ABPCs described herein, the first antigen-binding domain includes a light chain variable domain comprising SEQ ID NO: 140, and a heavy chain variable domain comprising SEQ ID NO: 1, SEQ ID NO: 13, SEQ ID NO: 14, SEQ ID NO: 15, SEQ ID NO: 16, SEQ ID NO: 17, SEQ ID NO: 18, SEQ ID NO: 19, SEQ ID NO: 20, SEQ ID NO: 21, SEQ ID NO: 22, SEQ ID NO: 23, SEQ ID NO: 24, SEQ ID NO: 25, SEQ ID NO: 26, SEQ ID NO: 27, SEQ ID NO: 28, SEQ ID NO: 29, SEQ ID NO: 30, SEQ ID NO: 31, SEQ ID NO: 32, SEQ ID NO: 33, SEQ ID NO: 34, SEQ ID NO: 35, SEQ ID NO: 36, SEQ ID NO: 37, SEQ ID NO: 38, SEQ ID NO: 39, SEQ ID NO: 40, SEQ ID NO: 41, SEQ ID NO: 42, SEQ ID NO: 43, SEQ ID NO: 44, SEQ ID NO: 45, SEQ ID NO: 46, SEQ ID NO: 47, SEQ ID NO: 48, SEQ ID NO: 49, SEQ ID NO: 50, SEQ ID NO: 82, SEQ ID NO: 83, SEQ ID NO: 84, SEQ ID NO: 85, SEQ ID NO: 86, SEQ ID NO: 87, SEQ ID NO: 88, SEQ ID NO: 89, SEQ ID NO: 90, SEQ ID NO: 91, SEQ ID NO: 92, SEQ ID NO: 93, SEQ ID NO: 94, SEQ ID NO: 95, SEQ ID NO: 96, SEQ ID NO: 97, SEQ ID NO: 98, SEQ ID NO: 99, SEQ ID NO: 100, SEQ ID NO: 101, SEQ ID NO: 102, SEQ ID NO: 103, SEQ ID NO: 104, SEQ ID NO: 105, SEQ ID NO: 106, SEQ ID NO: 107, SEQ ID NO: 108, SEQ ID NO: 109, SEQ ID NO: 110, SEQ ID NO: 111, SEQ ID NO: 112, SEQ ID NO: 113, SEQ ID NO: 114, SEQ ID NO: 115, SEQ ID NO: 116, SEQ ID NO: 117, SEQ ID NO: 118, SEQ ID NO: 119, SEQ ID NO: 120, SEQ ID NO: 121, SEQ ID NO: 122, SEQ ID NO: 123, SEQ ID NO: 124, SEQ ID NO: 125, SEQ ID NO: 126, SEQ ID NO: 127, SEQ ID NO: 128, SEQ ID NO: 129, or SEQ ID NO: 130.

[0284] In some examples of any of the ABPCs described herein, the first antigen-binding domain includes a light chain variable domain comprising SEQ ID NO: 141, and a heavy chain variable domain comprising SEQ ID NO: 1, SEQ ID NO: 13, SEQ ID NO: 14, SEQ ID NO: 15, SEQ ID NO: 16, SEQ ID NO: 17, SEQ ID NO: 18, SEQ ID NO: 19, SEQ ID NO: 20, SEQ ID NO: 21, SEQ ID NO: 22, SEQ ID NO: 23, SEQ ID NO: 24, SEQ ID NO: 25, SEQ ID NO: 26, SEQ ID NO: 27, SEQ ID NO: 28, SEQ ID NO: 29, SEQ ID NO: 30, SEQ ID NO: 31, SEQ ID NO: 32, SEQ ID NO: 33, SEQ ID NO: 34, SEQ ID NO: 35, SEQ ID NO: 36, SEQ ID NO: 37, SEQ ID NO: 38, SEQ ID NO: 39, SEQ ID NO: 40, SEQ ID NO: 41, SEQ ID NO: 42, SEQ ID NO: 43, SEQ ID NO: 44, SEQ ID NO: 45, SEQ ID NO: 46, SEQ ID NO: 47, SEQ ID NO: 48, SEQ ID NO: 49, SEQ ID NO: 50, SEQ ID NO: 82, SEQ ID NO: 83, SEQ ID NO: 84, SEQ ID NO: 85, SEQ ID NO: 86, SEQ ID NO: 87, SEQ ID NO: 88, SEQ ID NO: 89, SEQ ID NO: 90, SEQ ID NO: 91, SEQ ID NO: 92, SEQ ID NO: 93, SEQ ID NO: 94, SEQ ID NO: 95, SEQ ID NO: 96, SEQ ID NO: 97, SEQ ID NO: 98, SEQ ID NO: 99, SEQ ID NO: 100, SEQ ID NO: 101, SEQ ID NO: 102, SEQ ID NO: 103, SEQ ID NO: 104, SEQ ID NO: 105, SEQ ID NO: 106, SEQ ID NO: 107, SEQ ID NO: 108, SEQ ID NO: 109, SEQ ID NO: 110, SEQ ID NO: 111, SEQ ID NO: 112, SEQ ID NO: 113, SEQ ID NO: 114, SEQ ID NO: 115, SEQ ID NO: 116, SEQ ID NO: 117, SEQ ID NO: 118, SEQ ID NO: 119, SEQ ID NO: 120, SEQ ID NO: 121, SEQ ID NO: 122, SEQ ID NO: 123, SEQ ID NO: 124, SEQ ID NO: 125, SEQ ID NO: 126, SEQ ID NO: 127, SEQ ID NO: 128, SEQ ID NO: 129, or SEQ ID NO: 130.

[0285] In some examples of any of the ABPCs described herein, the first antigen-binding domain includes a light chain variable domain comprising SEQ ID NO: 144, and a heavy chain variable domain comprising SEQ ID NO: 1, SEQ ID NO: 13, SEQ ID NO: 14, SEQ ID NO: 15, SEQ ID NO: 16, SEQ ID NO: 17, SEQ ID NO: 18, SEQ ID NO: 19, SEQ ID NO: 20, SEQ ID NO: 21, SEQ ID NO: 22, SEQ ID NO: 23, SEQ ID NO: 24, SEQ ID NO: 25, SEQ ID NO: 26, SEQ ID NO: 27, SEQ ID NO: 28, SEQ ID NO: 29, SEQ ID NO: 30, SEQ ID NO: 31, SEQ ID NO: 32, SEQ ID NO: 33, SEQ ID NO: 34, SEQ ID NO: 35, SEQ ID NO: 36, SEQ ID NO: 37, SEQ ID NO: 38, SEQ ID NO: 39, SEQ ID NO: 40, SEQ ID NO: 41, SEQ ID NO: 42, SEQ ID NO: 43, SEQ ID NO: 44, SEQ ID NO: 45, SEQ ID NO: 46, SEQ ID NO: 47, SEQ ID NO: 48, SEQ ID NO: 49, SEQ ID NO: 50, SEQ ID NO: 82, SEQ ID NO: 83, SEQ ID NO: 84, SEQ ID NO: 85, SEQ ID NO: 86, SEQ ID NO: 87, SEQ ID NO: 88, SEQ ID NO: 89, SEQ ID NO: 90, SEQ ID NO: 91, SEQ ID NO: 92, SEQ ID NO: 93, SEQ ID NO: 94, SEQ ID NO: 95, SEQ ID NO: 96, SEQ ID NO: 97, SEQ ID NO: 98, SEQ ID NO: 99, SEQ ID NO: 100, SEQ ID NO: 101, SEQ ID NO: 102, SEQ ID NO: 103, SEQ ID NO: 104, SEQ ID NO: 105, SEQ ID NO: 106, SEQ ID NO: 107, SEQ ID NO: 108, SEQ ID NO: 109, SEQ ID NO: 110, SEQ ID NO: 111, SEQ ID NO: 112, SEQ ID NO: 113, SEQ ID NO: 114, SEQ ID NO: 115, SEQ ID NO: 116, SEQ ID NO: 117, SEQ ID NO: 118, SEQ ID NO: 119, SEQ ID NO: 120, SEQ ID NO: 121, SEQ ID NO: 122, SEQ ID NO: 123, SEQ ID NO: 124, SEQ ID NO: 125, SEQ ID NO: 126, SEQ ID NO: 127, SEQ ID NO: 128, SEQ ID NO: 129, or SEQ ID NO: 130.

[0286] In some examples of any of the ABPCs described herein, the first antigen-binding domain includes a light chain variable domain comprising SEQ ID NO: 143, and a heavy chain variable domain comprising SEQ ID NO: 1, SEQ ID NO: 13, SEQ ID NO: 14, SEQ ID NO: 15, SEQ ID NO: 16, SEQ ID NO: 17, SEQ ID NO: 18, SEQ ID NO: 19, SEQ ID NO: 20, SEQ ID NO: 21, SEQ ID NO: 22, SEQ ID NO: 23, SEQ ID NO: 24, SEQ ID NO: 25, SEQ ID NO: 26, SEQ ID NO: 27, SEQ ID NO: 28, SEQ ID NO: 29, SEQ ID NO: 30, SEQ ID NO: 31, SEQ ID NO: 32, SEQ ID NO: 33, SEQ ID NO: 34, SEQ ID NO: 35, SEQ ID NO: 36, SEQ ID NO: 37, SEQ ID NO: 38, SEQ ID NO: 39, SEQ ID NO: 40, SEQ ID NO: 41, SEQ ID NO: 42, SEQ ID NO: 43, SEQ ID NO: 44, SEQ ID NO: 45, SEQ ID NO: 46, SEQ ID NO: 47, SEQ ID NO: 48, SEQ ID NO: 49, SEQ ID NO: 50, SEQ ID NO: 82, SEQ ID NO: 83, SEQ ID NO: 84, SEQ ID NO: 85, SEQ ID NO: 86, SEQ ID NO: 87, SEQ ID NO: 88, SEQ ID NO: 89, SEQ ID NO: 90, SEQ ID NO: 91, SEQ ID NO: 92, SEQ ID NO: 93, SEQ ID NO: 94, SEQ ID NO: 95, SEQ ID NO: 96, SEQ ID NO: 97, SEQ ID NO: 98, SEQ ID NO: 99, SEQ ID NO: 100, SEQ ID NO: 101, SEQ ID NO: 102, SEQ ID NO: 103, SEQ ID NO: 104, SEQ ID NO: 105, SEQ ID NO: 106, SEQ ID NO: 107, SEQ ID NO: 108, SEQ ID NO: 109, SEQ ID NO: 110, SEQ ID NO: 111, SEQ ID NO: 112, SEQ ID NO: 113, SEQ ID NO: 114, SEQ ID NO: 115, SEQ ID NO: 116, SEQ ID NO: 117, SEQ ID NO: 118, SEQ ID NO: 119, SEQ ID NO: 120, SEQ ID NO: 121, SEQ ID NO: 122, SEQ ID NO: 123, SEQ ID NO: 124, SEQ ID NO: 125, SEQ ID NO: 126, SEQ ID NO: 127, SEQ ID NO: 128, SEQ ID NO: 129, or SEQ ID NO: 130.

[0287] In some examples of any of the ABPCs described herein, the first antigen-binding domain includes a light chain variable domain comprising SEQ ID NO: 144, and a heavy chain variable domain comprising SEQ ID NO: 1, SEQ ID NO: 13, SEQ ID NO: 14, SEQ ID NO: 15, SEQ ID NO: 16, SEQ ID NO: 17, SEQ ID NO: 18, SEQ ID NO: 19, SEQ ID NO: 20, SEQ ID NO: 21, SEQ ID NO: 22, SEQ ID NO: 23, SEQ ID NO: 24, SEQ ID NO: 25, SEQ ID NO: 26, SEQ ID NO: 27, SEQ ID NO: 28, SEQ ID NO: 29, SEQ ID NO: 30, SEQ ID NO: 31, SEQ ID NO: 32, SEQ ID NO: 33, SEQ ID NO: 34, SEQ ID NO: 35, SEQ ID NO: 36, SEQ ID NO: 37, SEQ ID NO: 38, SEQ ID NO: 39, SEQ ID NO: 40, SEQ ID NO: 41, SEQ ID NO: 42, SEQ ID NO: 43, SEQ ID NO: 44, SEQ ID NO: 45, SEQ ID NO: 46, SEQ ID NO: 47, SEQ ID NO: 48, SEQ ID NO: 49, SEQ ID NO: 50, SEQ ID NO: 82, SEQ ID NO: 83, SEQ ID NO: 84, SEQ ID NO: 85, SEQ ID NO: 86, SEQ ID NO: 87, SEQ ID NO: 88, SEQ ID NO: 89, SEQ ID NO: 90, SEQ ID NO: 91, SEQ ID NO: 92, SEQ ID NO: 93, SEQ ID NO: 94, SEQ ID NO: 95, SEQ ID NO: 96, SEQ ID NO: 97, SEQ ID NO: 98, SEQ ID NO: 99, SEQ ID NO: 100, SEQ ID NO: 101, SEQ ID NO: 102, SEQ ID NO: 103, SEQ ID NO: 104, SEQ ID NO: 105, SEQ ID NO: 106, SEQ ID NO: 107, SEQ ID NO: 108, SEQ ID NO: 109, SEQ ID NO: 110, SEQ ID NO: 111, SEQ ID NO: 112, SEQ ID NO: 113, SEQ ID NO: 114, SEQ ID NO: 115, SEQ ID NO: 116, SEQ ID NO: 117, SEQ ID NO: 118, SEQ ID NO: 119, SEQ ID NO: 120, SEQ ID NO: 121, SEQ ID NO: 122, SEQ ID NO: 123, SEQ ID NO: 124, SEQ ID NO: 125, SEQ ID NO: 126, SEQ ID NO: 127, SEQ ID NO: 128, SEQ ID NO: 129, or SEQ ID NO: 130.

[0288] In some examples of any of the ABPCs described herein, the first antigen-binding domain includes a light chain variable domain comprising SEQ ID NO: 145, and a heavy chain variable domain comprising SEQ ID NO: 1, SEQ ID NO: 13, SEQ ID NO: 14, SEQ ID NO: 15, SEQ ID NO: 16, SEQ ID NO: 17, SEQ ID NO: 18, SEQ ID NO: 19, SEQ ID NO: 20, SEQ ID NO: 21, SEQ ID NO: 22, SEQ ID NO: 23, SEQ ID NO: 24, SEQ ID NO: 25, SEQ ID NO: 26, SEQ ID NO: 27, SEQ ID NO: 28, SEQ ID NO: 29, SEQ ID NO: 30, SEQ ID NO: 31, SEQ ID NO: 32, SEQ ID NO: 33, SEQ ID NO: 34, SEQ ID NO: 35, SEQ ID NO: 36, SEQ ID NO: 37, SEQ ID NO: 38, SEQ ID NO: 39, SEQ ID NO: 40, SEQ ID NO: 41, SEQ ID NO: 42, SEQ ID NO: 43, SEQ ID NO: 44, SEQ ID NO: 45, SEQ ID NO: 46, SEQ ID NO: 47, SEQ ID NO: 48, SEQ ID NO: 49, SEQ ID NO: 50, SEQ ID NO: 82, SEQ ID NO: 83, SEQ ID NO: 84, SEQ ID NO: 85, SEQ ID NO: 86, SEQ ID NO: 87, SEQ ID NO: 88, SEQ ID NO: 89, SEQ ID NO: 90, SEQ ID NO: 91, SEQ ID NO: 92, SEQ ID NO: 93, SEQ ID NO: 94, SEQ ID NO: 95, SEQ ID NO: 96, SEQ ID NO: 97, SEQ ID NO: 98, SEQ ID NO: 99, SEQ ID NO: 100, SEQ ID NO: 101, SEQ ID NO: 102, SEQ ID NO: 103, SEQ ID NO: 104, SEQ ID NO: 105, SEQ ID NO: 106, SEQ ID NO: 107, SEQ ID NO: 108, SEQ ID NO: 109, SEQ ID NO: 110, SEQ ID NO: 111, SEQ ID NO: 112, SEQ ID NO: 113, SEQ ID NO: 114, SEQ ID NO: 115, SEQ ID NO: 116, SEQ ID NO: 117, SEQ ID NO: 118, SEQ ID NO: 119, SEQ ID NO: 120, SEQ ID NO: 121, SEQ ID NO: 122, SEQ ID NO: 123, SEQ ID NO: 124, SEQ ID NO: 125, SEQ ID NO: 126, SEQ ID NO: 127, SEQ ID NO: 128, SEQ ID NO: 129, or SEQ ID NO: 130.

[0289] In some examples of any of the ABPCs described herein, the first antigen-binding domain includes a heavy chain variable domain of a Emibetuzumab with one or more (e.g., one, two, three, four, five, six, seven, eight, nine, ten, eleven, twelve, thirteen, fourteen, fifteen, sixteen, seventeen, eighteen, nineteen, or twenty) amino acids substituted with a histidine. In some examples of any of the ABPCs described herein, the first antigen-binding domain includes a light chain variable domain of Emibetuzumab with one or more (e.g., one, two, three, four, five, six, seven, eight, nine, ten, eleven, twelve, thirteen, fourteen, fifteen, sixteen, seventeen, eighteen, nineteen, or twenty) amino acids substituted with a histidine. In some examples of any of the ABPCs described herein, the first antigen-binding domain includes a heavy chain variable domain of Emibetuzumab with one or more (e.g., one, two, three, four, five, six, seven, eight, nine, ten, eleven, twelve, thirteen, fourteen, fifteen, sixteen, seventeen, eighteen, nineteen, or twenty) amino acids substituted with a histidine; and a light chain variable domain of Emibetuzumab with one or more (e.g., one, two, three, four, five, six, seven, eight, nine, ten, eleven, twelve, thirteen, fourteen, fifteen, sixteen, seventeen, eighteen, nineteen, or twenty) amino acids substituted with a histidine. In some examples of any of the ABPCs described herein, the heavy chain variable domain of Emibetuzumab comprises SEQ ID NO: 146. In some examples of any of the ABPCs described herein, the light chain variable domain of Emibetuzumab comprises SEQ ID NO: 147.

[0290] In some examples of any of the ABPCs described herein, the first antigen-binding domain comprises a heavy chain variable domain comprising a CDR1, a CDR2, and a CDR3 of SEQ ID NO: 148, SEQ ID NO: 149, and SEQ ID NO: 150, respectively, with collectively a total of one or more (e.g., one, two, three, four, five, six, seven, eight, nine, or ten) amino acid positions in SEQ ID NOs: 148-150 substituted with a histidine. In some examples of any of the ABPCs described herein, the first antigen-binding domain comprises a light chain variable domain comprising a CDR1, a CDR2, and a CDR3 of SEQ ID NO: 151, SEQ ID NO: 152, and SEQ ID NO: 153, respectively, with collectively a total of one or more (e.g., one, two, three, four, five, six, seven, eight, nine, or ten) amino acid positions in SEQ ID NOs: 151-153 substituted with a histidine. In some examples of any of the ABPCs described herein, the first antigen-binding domain includes: a heavy chain variable domain comprising a CDR1, a CDR2, and a CDR3 of SEQ ID NO: 148, SEQ ID NO: 149, and SEQ ID NO: 150, respectively, with collectively a total of one or more (e.g., one, two, three, four, five, six, seven, eight, nine, or ten) amino acid positions in SEQ ID NOs: 148-150 substituted with a histidine; and a light chain variable domain comprising a CDR1, a CDR2, and a CDR3 of SEQ ID NO: 151, SEQ ID NO: 152, and SEQ ID NO: 153, respectively, with collectively a total of one or more (e.g., one, two, three, four, five, six, seven, eight, nine, or ten) amino acid positions in SEQ ID NOs: 151-153 substituted with a histidine.

[0291] In some examples of any of the ABPCs described herein, the first antigen-binding domain includes a heavy chain variable domain that is at least 90% (e.g., at least 92%, at least 94%, at least 96%, at least 98%, at least 99%, or 100%) identical to SEQ ID NO: 146, where the heavy chain variable domain includes a histidine at one or more (e.g., one, two, three, four, five, six, seven, eight, nine, ten, eleven, twelve, thirteen, fourteen, fifteen, sixteen, seventeen, eighteen, nineteen, or twenty) amino acid positions in SEQ ID NO: 146 selected from the group consisting of: 31, 50, 51, 52, 53, 54, 56, 57, 59, 98, 99, 100, and 103. In some examples of any of the ABPCs described herein, the first antigen-binding domain includes a light chain variable domain that is at least 90% (e.g., at least 92%, at least 94%, at least 96%, at least 98%, at least 99%, or 100%) identical to SEQ ID NO: 147, where the light chain variable domain includes a histidine at one or more (e.g., one, two, three, four, five, six, seven, eight, nine, ten, eleven, twelve, thirteen, fourteen, fifteen, sixteen, seventeen, eighteen, nineteen, or twenty) amino acid positions in SEQ ID NO: 147 selected from the group consisting of: 25, 26, 29, 32, 33, 51, 91, 92, 95, 96, and 97. In some examples of any of the ABPCs described herein the first antigen-binding domain includes: a heavy chain variable domain that is at least 90% (e.g., at least 92%, at least 94%, at least 96%, at least 98%, at least 99%, or 100%) identical to SEQ ID NO: 146, where the heavy chain variable domain includes a histidine at one or more (e.g., one, two, three, four, five, six, seven, eight, nine, ten, eleven, twelve, thirteen, fourteen, fifteen, sixteen, seventeen, eighteen, nineteen, or twenty) amino acid positions in SEQ ID NO: 146 selected from the group consisting of: 31, 50, 51, 52, 53, 54, 56, 57, 59, 98, 99, 100, and 103, and a light chain variable domain that is at least 90% (e.g., at least 92%, at least 94%, at least 96%, at least 98%, at least 99%, or 100%) identical to SEQ ID NO: 147, where the light chain variable domain includes a histidine at one or more (e.g., one, two, three, four, five, six, seven, eight, nine, ten, eleven, twelve, thirteen, fourteen, fifteen, sixteen, seventeen, eighteen, nineteen, or twenty) amino acid positions in SEQ ID NO: 147 selected from the group consisting of: 25, 26, 29, 32, 33, 51, 91, 92, 95, 96, and 97.

[0292] In some examples of any of the ABPCs described herein, a heavy chain variable domain includes a heavy chain variable domain that is at least 90% (e.g., at least 92%, at least 94%, at least 96%, at least 98%, at least 99%, or 100%) identical to SEQ ID NO: 146, where the heavy chain variable domain includes a histidine at any of the specific combinations of one or more amino acid positions in SEQ ID NO: 146 listed in Table 3.

TABLE 3
Exemplary Combinations of Amino Acid Positions in SEQ
ID NO: 146 that can be Substituted with Histidine

31 + 50, 31 + 51, 31 + 52, 31 + 53, 31 + 54, 31 + 56, 31 + 57, 31 + 59, 31 + 98, 31 + 99, 31 +
100, 31 + 103, 50 + 51, 50 + 52, 50 + 53, 50 + 54, 50 + 56, 50 + 57, 50 + 59, 50 + 98, 50 +
99, 50 + 100, 50 + 103, 51 + 52, 51 + 53, 51 + 54, 51 + 56, 51 + 57, 51 + 59, 51 + 98, 51 +
99, 51 + 100, 51 + 103, 52 + 53, 52 + 54, 52 + 56, 52 + 57, 52 + 59, 52 + 98, 52 + 99, 52 +
100, 52 + 103, 53 + 54, 53 + 56, 53 + 57, 53 + 59, 53 + 98, 53 + 99, 53 + 100, 53 + 103,
54 + 56, 54 + 57, 54 + 59, 54 + 98, 54 + 99, 54 + 100, 54 + 103, 56 + 57, 56 + 59, 56 + 98,
56 + 99, 56 + 100, 56 + 103, 57 + 59, 57 + 98, 57 + 99, 57 + 100, 57 + 103, 59 + 98, 59 +
99, 59 + 100, 59 + 103, 98 + 99, 98 + 100, 98 + 103, 99 + 100, 99 + 103, 100 + 103, 31 +
50 + 51, 31 + 50 + 52, 31 + 50 + 53, 31 + 50 + 54, 31 + 50 + 56, 31 + 50 + 57, 31 + 50 +
59, 31 + 50 + 98, 31 + 50 + 99, 31 + 50 + 100, 31 + 50 + 103, 31 + 51 + 52, 31 + 51 + 53,
31 + 51 + 54, 31 + 51 + 56, 31 + 51 + 57, 31 + 51 + 59, 31 + 51 + 98, 31 + 51 + 99, 31 +
51 + 100, 31 + 51 + 103, 31 + 52 + 53, 31 + 52 + 54, 31 + 52 + 56, 31 + 52 + 57, 31 + 52 +
59, 31 + 52 + 98, 31 + 52 + 99, 31 + 52 + 100, 31 + 52 + 103, 31 + 53 + 54, 31 + 53 + 56,
31 + 53 + 57, 31 + 53 + 59, 31 + 53 + 98, 31 + 53 + 99, 31 + 53 + 100, 31 + 53 + 103, 31 +
54 + 56, 31 + 54 + 57, 31 + 54 + 59, 31 + 54 + 98, 31 + 54 + 99, 31 + 54 + 100, 31 + 54 +
103, 31 + 56 + 57, 31 + 56 + 59, 31 + 56 + 98, 31 + 56 + 99, 31 + 56 + 100, 31 + 56 + 103,
31 + 57 + 59, 31 + 57 + 98, 31 + 57 + 99, 31 + 57 + 100, 31 + 57 + 103, 31 + 59 + 98, 31 +
59 + 99, 31 + 59 + 100, 31 + 59 + 103, 31 + 98 + 99, 31 + 98 + 100, 31 + 98 + 103, 31 +
99 + 100, 31 + 99 + 103, 31 + 100 + 103, 50 + 51 + 52, 50 + 51 + 53, 50 + 51 + 54, 50 +
51 + 56, 50 + 51 + 57, 50 + 51 + 59, 50 + 51 + 98, 50 + 51 + 99, 50 + 51 + 100, 50 + 51 +
103, 50 + 52 + 53, 50 + 52 + 54, 50 + 52 + 56, 50 + 52 + 57, 50 + 52 + 59, 50 + 52 + 98,
50 + 52 + 99, 50 + 52 + 100, 50 + 52 + 103, 50 + 53 + 54, 50 + 53 + 56, 50 + 53 + 57, 50 +
53 + 59, 50 + 53 + 98, 50 + 53 + 99, 50 + 53 + 100, 50 + 53 + 103, 50 + 54 + 56, 50 + 54 +
57, 50 + 54 + 59, 50 + 54 + 98, 50 + 54 + 99, 50 + 54 + 100, 50 + 54 + 103, 50 + 56 + 57,
50 + 56 + 59, 50 + 56 + 98, 50 + 56 + 99, 50 + 56 + 100, 50 + 56 + 103, 50 + 57 + 59, 50 +
57 + 98, 50 + 57 + 99, 50 + 57 + 100, 50 + 57 + 103, 50 + 59 + 98, 50 + 59 + 99, 50 + 59 +
100, 50 + 59 + 103, 50 + 98 + 99, 50 + 98 + 100, 50 + 98 + 103, 50 + 99 + 100, 50 + 99 +
103, 50 + 100 + 103, 51 + 52 + 53, 51 + 52 + 54, 51 + 52 + 56, 51 + 52 + 57, 51 + 52 + 59,
51 + 52 + 98, 51 + 52 + 99, 51 + 52 + 100, 51 + 52 + 103, 51 + 53 + 54, 51 + 53 + 56, 51 +
53 + 57, 51 + 53 + 59, 51 + 53 + 98, 51 + 53 + 99, 51 + 53 + 100, 51 + 53 + 103, 51 + 54 +
56, 51 + 54 + 57, 51 + 54 + 59, 51 + 54 + 98, 51 + 54 + 99, 51 + 54 + 100, 51 + 54 + 103,
51 + 56 + 57, 51 + 56 + 59, 51 + 56 + 98, 51 + 56 + 99, 51 + 56 + 100, 51 + 56 + 103, 51 +
57 + 59, 51 + 57 + 98, 51 + 57 + 99, 51 + 57 + 100, 51 + 57 + 103, 51 + 59 + 98, 51 + 59 +
99, 51 + 59 + 100, 51 + 59 + 103, 51 + 98 + 99, 51 + 98 + 100, 51 + 98 + 103, 51 + 99 +
100, 51 + 99 + 103, 51 + 100 + 103, 52 + 53 + 54, 52 + 53 + 56, 52 + 53 + 57, 52 + 53 +
59, 52 + 53 + 98, 52 + 53 + 99, 52 + 53 + 100, 52 + 53 + 103, 52 + 54 + 56, 52 + 54 + 57,
52 + 54 + 59, 52 + 54 + 98, 52 + 54 + 99, 52 + 54 + 100, 52 + 54 + 103, 52 + 56 + 57, 52 +
56 + 59, 52 + 56 + 98, 52 + 56 + 99, 52 + 56 + 100, 52 + 56 + 103, 52 + 57 + 59, 52 + 57 +
98, 52 + 57 + 99, 52 + 57 + 100, 52 + 57 + 103, 52 + 59 + 98, 52 + 59 + 99, 52 + 59 + 100,
52 + 59 + 103, 52 + 98 + 99, 52 + 98 + 100, 52 + 98 + 103, 52 + 99 + 100, 52 + 99 + 103,
52 + 100 + 103, 53 + 54 + 56, 53 + 54 + 57, 53 + 54 + 59, 53 + 54 + 98, 53 + 54 + 99, 53 +
54 + 100, 53 + 54 + 103, 53 + 56 + 57, 53 + 56 + 59, 53 + 56 + 98, 53 + 56 + 99, 53 + 56 +
100, 53 + 56 + 103, 53 + 57 + 59, 53 + 57 + 98, 53 + 57 + 99, 53 + 57 + 100, 53 + 57 +
103, 53 + 59 + 98, 53 + 59 + 99, 53 + 59 + 100, 53 + 59 + 103, 53 + 98 + 99, 53 + 98 +
100, 53 + 98 + 103, 53 + 99 + 100, 53 + 99 + 103, 53 + 100 + 103, 54 + 56 + 57, 54 + 56 +
59, 54 + 56 + 98, 54 + 56 + 99, 54 + 56 + 100, 54 + 56 + 103, 54 + 57 + 59, 54 + 57 + 98,
54 + 57 + 99, 54 + 57 + 100, 54 + 57 + 103, 54 + 59 + 98, 54 + 59 + 99, 54 + 59 + 100, 54 +
59 + 103, 54 + 98 + 99, 54 + 98 + 100, 54 + 98 + 103, 54 + 99 + 100, 54 + 99 + 103, 54 +
100 + 103, 56 + 57 + 59, 56 + 57 + 98, 56 + 57 + 99, 56 + 57 + 100, 56 + 57 + 103, 56 +
59 + 98, 56 + 59 + 99, 56 + 59 + 100, 56 + 59 + 103, 56 + 98 + 99, 56 + 98 + 100, 56 + 98 +
103, 56 + 99 + 100, 56 + 99 + 103, 56 + 100 + 103, 57 + 59 + 98, 57 + 59 + 99, 57 + 59 +
100, 57 + 59 + 103, 57 + 98 + 99, 57 + 98 + 100, 57 + 98 + 103, 57 + 99 + 100, 57 + 99 +
103, 57 + 100 + 103, 59 + 98 + 99, 59 + 98 + 100, 59 + 98 + 103, 59 + 99 + 100, 59 + 99 +
103, 59 + 100 + 103, 98 + 99 + 100, 98 + 99 + 103, 98 + 100 + 103, 99 + 100 + 103

[0293] In some examples of any of the ABPCs described herein, a light chain variable domain includes a light chain variable domain that is at least 90% (e.g., at least 92%, at least 94%, at least 96%, at least 98%, at least 99%, or 100%) identical to SEQ ID NO: 147, where the light chain variable domain includes a histidine at any of the specific combinations of one or more amino acid positions in SEQ ID NO: 147 listed in Table 4.

[0294] In some examples of any of the ABPCs described herein, the first antigen-binding domain includes a light chain variable domain that is at least 90% (e.g., at least 92%, at least 94%, at least 96%, at least 98%, at least 99%, or 100%) identical to SEQ ID NO: 147, where the light chain variable domain includes an alanine at position 35 in SEQ ID NO: 147.

[0295] In some examples of any of the ABPCs described herein the first antigen-binding domain includes: a light chain variable domain that is at least 90% (e.g., at least 92%, at least 94%, at least 96%, at least 98%, at least 99%, or 100%) identical to SEQ ID NO: 147, where the light chain variable domain includes an alanine at position 35 in SEQ ID NO: 147, and a heavy chain variable domain that is at least 90% (e.g., at least 92%, at least 94%, at least 96%, at least 98%, at least 99%, or 100%) identical to SEQ ID NO: 146, where the heavy chain variable domain includes a histidine at one or more (e.g., one, two, three, four, five, six, seven, eight, nine, ten, eleven, twelve, thirteen, fourteen, fifteen, sixteen, seventeen, eighteen, nineteen, or twenty) amino acid positions in SEQ ID NO: 146 selected from the group consisting of: 31, 50, 51, 52, 53, 54, 56, 57, 59, 98, 99, 100, and 103.

[0296] In some examples of any of the ABPCs described herein, the first antigen-binding domain includes a light chain variable domain that is at least 90% (e.g., at least 92%, at least 94%, at least 96%, at least 98%, at least 99%, or 100%) identical to SEQ ID NO: 147, where the light chain variable domain includes a histidine at one or more (e.g., one, two, three, four, five, six, seven, eight, nine, ten, eleven, twelve, thirteen, fourteen, fifteen, sixteen, seventeen, eighteen, nineteen, or twenty) amino acid positions in SEQ ID NO: 147 selected from the group consisting of: 25, 26, 29, 32, 33, 51, 91, 92, 95, 96, and 97, and where the light chain variable domain includes an alanine at position 35 in SEQ ID NO: 147. In some examples of any of the ABPCs described herein the first antigen-binding domain includes: a light chain variable domain that is at least 90% (e.g., at least 92%, at least 94%, at least 96%, at least 98%, at least 99%, or 100%) identical to SEQ ID NO: 147, where the light chain variable domain includes a histidine at one or more (e.g., one, two, three, four, five, six, seven, eight, nine, ten, eleven, twelve, thirteen, fourteen, fifteen, sixteen, seventeen, eighteen, nineteen, or twenty) amino acid positions in SEQ ID NO: 147 selected from the group consisting of: 25, 26, 29, 32, 33, 51, 91, 92, 95, 96, and 97, and where the light chain variable domain includes an alanine at position 35 in SEQ ID NO: 147, and a heavy chain variable domain that is at least 90% (e.g., at least 92%, at least 94%, at least 96%, at least 98%, at least 99%, or 100%) identical to SEQ ID NO: 146, where the heavy chain variable domain includes a histidine at one or more (e.g., one, two, three, four, five, six, seven, eight, nine, ten, eleven, twelve, thirteen, fourteen, fifteen, sixteen, seventeen, eighteen, nineteen, or twenty) amino acid positions in SEQ ID NO: 146 selected from the group consisting of: 31, 50, 51, 52, 53, 54, 56, 57, 59, 98, 99, 100, and 103.

[0297] In some examples of any of the ABPCs described herein, a light chain variable domain includes a light chain variable domain that is at least 90% (e.g., at least 92%, at least 94%, at least 96%, at least 98%, at least 99%, or 100%) identical to SEQ ID NO: 147, where the light chain variable domain includes a histidine at any of the specific combinations of one or more amino acid positions in SEQ ID NO: 147 listed in Table 4 and where the light chain variable domain includes an alanine at position 35 of SEQ ID NO: 147.

TABLE 4
Exemplary Combinations of Amino Acid Positions in SEQ
ID NO: 147 that can be Substituted with Histidine

25 + 26, 25 + 29, 25 + 32, 25 + 33, 25 + 51, 25 + 91, 25 + 92, 25 + 95, 25 + 96, 25 + 97, 26 +
29, 26 + 32, 26 + 33, 26 + 51, 26 + 91, 26 + 92, 26 + 95, 26 + 96, 26 + 97, 29 + 32, 29 +
33, 29 + 51, 29 + 91, 29 + 92, 29 + 95, 29 + 96, 29 + 97, 32 + 33, 32 + 51, 32 + 91, 32 +
92, 32 + 95, 32 + 96, 32 + 97, 33 + 51, 33 + 91, 33 + 92, 33 + 95, 33 + 96, 33 + 97, 51 +
91, 51 + 92, 51 + 95, 51 + 96, 51 + 97, 91 + 92, 91 + 95, 91 + 96, 91 + 97, 92 + 95, 92 +
96, 92 + 97, 95 + 96, 95 + 97, 96 + 97, 25 + 26 + 29, 25 + 26 + 32, 25 + 26 + 33, 25 + 26 +
51, 25 + 26 + 91, 25 + 26 + 92, 25 + 26 + 95, 25 + 26 + 96, 25 + 26 + 97, 25 + 29 + 32,
25 + 29 + 33, 25 + 29 + 51, 25 + 29 + 91, 25 + 29 + 92, 25 + 29 + 95, 25 + 29 + 96, 25 +
29 + 97, 25 + 32 + 33, 25 + 32 + 51, 25 + 32 + 91, 25 + 32 + 92, 25 + 32 + 95, 25 + 32 +
96, 25 + 32 + 97, 25 + 33 + 51, 25 + 33 + 91, 25 + 33 + 92, 25 + 33 + 95, 25 + 33 + 96, 25 +
33 + 97, 25 + 51 + 91, 25 + 51 + 92, 25 + 51 + 95, 25 + 51 + 96, 25 + 51 + 97, 25 + 91 +
92, 25 + 91 + 95, 25 + 91 + 96, 25 + 91 + 97, 25 + 92 + 95, 25 + 92 + 96, 25 + 92 + 97, 25 +
95 + 96, 25 + 95 + 97, 25 + 96 + 97, 26 + 29 + 32, 26 + 29 + 33, 26 + 29 + 51, 26 + 29 +
91, 26 + 29 + 92, 26 + 29 + 95, 26 + 29 + 96, 26 + 29 + 97, 26 + 32 + 33, 26 + 32 + 51, 26 +
32 + 91, 26 + 32 + 92, 26 + 32 + 95, 26 + 32 + 96, 26 + 32 + 97, 26 + 33 + 51, 26 + 33 +
91, 26 + 33 + 92, 26 + 33 + 95, 26 + 33 + 96, 26 + 33 + 97, 26 + 51 + 91, 26 + 51 + 92, 26 +
51 + 95, 26 + 51 + 96, 26 + 51 + 97, 26 + 91 + 92, 26 + 91 + 95, 26 + 91 + 96, 26 + 91 +
97, 26 + 92 + 95, 26 + 92 + 96, 26 + 92 + 97, 26 + 95 + 96, 26 + 95 + 97, 26 + 96 + 97, 29 +
32 + 33, 29 + 32 + 51, 29 + 32 + 91, 29 + 32 + 92, 29 + 32 + 95, 29 + 32 + 96, 29 + 32 +
97, 29 + 33 + 51, 29 + 33 + 91, 29 + 33 + 92, 29 + 33 + 95, 29 + 33 + 96, 29 + 33 + 97, 29 +
51 + 91, 29 + 51 + 92, 29 + 51 + 95, 29 + 51 + 96, 29 + 51 + 97, 29 + 91 + 92, 29 + 91 +
95, 29 + 91 + 96, 29 + 91 + 97, 29 + 92 + 95, 29 + 92 + 96, 29 + 92 + 97, 29 + 95 + 96, 29 +
95 + 97, 29 + 96 + 97, 32 + 33 + 51, 32 + 33 + 91, 32 + 33 + 92, 32 + 33 + 95, 32 + 33 +
96, 32 + 33 + 97, 32 + 51 + 91, 32 + 51 + 92, 32 + 51 + 95, 32 + 51 + 96, 32 + 51 + 97, 32 +
91 + 92, 32 + 91 + 95, 32 + 91 + 96, 32 + 91 + 97, 32 + 92 + 95, 32 + 92 + 96, 32 + 92 +
97, 32 + 95 + 96, 32 + 95 + 97, 32 + 96 + 97, 33 + 51 + 91, 33 + 51 + 92, 33 + 51 + 95, 33 +
51 + 96, 33 + 51 + 97, 33 + 91 + 92, 33 + 91 + 95, 33 + 91 + 96, 33 + 91 + 97, 33 + 92 +
95, 33 + 92 + 96, 33 + 92 + 97, 33 + 95 + 96, 33 + 95 + 97, 33 + 96 + 97, 51 + 91 + 92, 51 +
91 + 95, 51 + 91 + 96, 51 + 91 + 97, 51 + 92 + 95, 51 + 92 + 96, 51 + 92 + 97, 51 + 95 +
96, 51 + 95 + 97, 51 + 96 + 97, 91 + 92 + 95, 91 + 92 + 96, 91 + 92 + 97, 91 + 95 + 96, 91 +
95 + 97, 91 + 96 + 97, 92 + 95 + 96, 92 + 95 + 97, 92 + 96 + 97, 95 + 96 + 97

[0298] In some examples of any of the ABPCs described herein, the first antigen-binding domain includes a heavy chain variable domain that is at least 90% (e.g., at least 92%, at least 94%, at least 96%, at least 98%, at least 99%, or 100%) identical to SEQ ID NO: 146, where the heavy chain variable domain includes a histidine at any of the specific combinations of one or more amino acid positions in SEQ ID NO: 146 listed in Table 3; and a light chain variable domain that that is at least 90% (e.g., at least 92%, at least 94%, at least 96%, at least 98%, at least 99%, or 100%) identical to SEQ ID NO: 147, where the light chain variable domain includes a histidine at any of the specific combinations of one or more amino acid positions in SEQ ID NO: 147 listed in Table 4.

[0299] In some examples of any of the ABPCs described herein, the first antigen-binding domain comprises a light chain variable domain comprising SEQ ID NO: 147, and a heavy chain variable domain that is at least 90% identical (e.g., at least 92%, at least 94%, at least 96%, at least 98%, at least 99%, or 100%) identical to SEQ ID NO: 146, where the heavy chain variable domain includes a histidine at any of the specific combinations of one or more (e.g., two, three, four, five, six, seven, eight, nine, or ten) amino acid positions in SEQ ID NO: 146 listed in Table 3.

[0300] In some examples of any of the ABPCs described herein, the first antigen-binding domain comprises a light chain variable domain that is at least 90% identical to SEQ ID NO: 147, wherein the light chain variable domain includes a histidine at position 25 in SEQ ID NO: 147; and a heavy chain variable domain that is at least 90% (e.g., at least 92%, at least 94%, at least 96%, at least 98%, at least 99%, or 100%) identical to SEQ ID NO: 146, where the heavy chain variable domain includes a histidine at any of the specific combinations of one or more amino acid positions in SEQ ID NO: 146 listed in Table 3.

[0301] In some examples of any of the ABPCs described herein, the first antigen-binding domain comprises a light chain variable domain that is at least 90% identical to SEQ ID NO: 147, wherein the light chain variable domain includes a histidine at position 26 in SEQ ID NO: 147; and a heavy chain variable domain that is at least 90% (e.g., at least 92%, at least 94%, at least 96%, at least 98%, at least 99%, or 100%) identical to SEQ ID NO: 146, where the heavy chain variable domain includes a histidine at any of the specific combinations of one or more amino acid positions in SEQ ID NO: 146 listed in Table 3.

[0302] In some examples of any of the ABPCs described herein, the first antigen-binding domain comprises a light chain variable domain that is at least 90% identical to SEQ ID NO: 147, wherein the light chain variable domain includes a histidine at position 29 in SEQ ID NO: 147; and a heavy chain variable domain that is at least 90% (e.g., at least 92%, at least 94%, at least 96%, at least 98%, at least 99%, or 100%) identical to SEQ ID NO: 146, where the heavy chain variable domain includes a histidine at any of the specific combinations of one or more amino acid positions in SEQ ID NO: 146 listed in Table 3.

[0303] In some examples of any of the ABPCs described herein, the first antigen-binding domain comprises a light chain variable domain that is at least 90% identical to SEQ ID NO: 147, wherein the light chain variable domain includes a histidine at position 32 in SEQ ID NO: 147; and a heavy chain variable domain that is at least 90% (e.g., at least 92%, at least 94%, at least 96%, at least 98%, at least 99%, or 100%) identical to SEQ ID NO: 146, where the heavy chain variable domain includes a histidine at any of the specific combinations of one or more amino acid positions in SEQ ID NO: 146 listed in Table 3.

[0304] In some examples of any of the ABPCs described herein, the first antigen-binding domain comprises a light chain variable domain that is at least 90% identical to SEQ ID NO: 147, wherein the light chain variable domain includes a histidine at position 33 in SEQ ID NO: 147; and a heavy chain variable domain that is at least 90% (e.g., at least 92%, at least 94%, at least 96%, at least 98%, at least 99%, or 100%) identical to SEQ ID NO: 146, where the heavy chain variable domain includes a histidine at any of the specific combinations of one or more amino acid positions in SEQ ID NO: 146 listed in Table 3.

[0305] In some examples of any of the ABPCs described herein, the first antigen-binding domain comprises a light chain variable domain that is at least 90% identical to SEQ ID NO: 147, wherein the light chain variable domain includes a histidine at position 51 in SEQ ID NO: 147; and a heavy chain variable domain that is at least 90% (e.g., at least 92%, at least 94%, at least 96%, at least 98%, at least 99%, or 100%) identical to SEQ ID NO: 146, where the heavy chain variable domain includes a histidine at any of the specific combinations of one or more amino acid positions in SEQ ID NO: 146 listed in Table 3.

[0306] In some examples of any of the ABPCs described herein, the first antigen-binding domain comprises a light chain variable domain that is at least 90% identical to SEQ ID NO: 147, wherein the light chain variable domain includes a histidine at position 91 in SEQ ID NO: 147; and a heavy chain variable domain that is at least 90% (e.g., at least 92%, at least 94%, at least 96%, at least 98%, at least 99%, or 100%) identical to SEQ ID NO: 146, where the heavy chain variable domain includes a histidine at any of the specific combinations of one or more amino acid positions in SEQ ID NO: 146 listed in Table 3.

[0307] In some examples of any of the ABPCs described herein, the first antigen-binding domain comprises a light chain variable domain that is at least 90% identical to SEQ ID NO: 147, wherein the light chain variable domain includes a histidine at position 92 in SEQ ID NO: 147; and a heavy chain variable domain that is at least 90% (e.g., at least 92%, at least 94%, at least 96%, at least 98%, at least 99%, or 100%) identical to SEQ ID NO: 146, where the heavy chain variable domain includes a histidine at any of the specific combinations of one or more amino acid positions in SEQ ID NO: 146 listed in Table 3.

[0308] In some examples of any of the ABPCs described herein, the first antigen-binding domain comprises a light chain variable domain that is at least 90% identical to SEQ ID NO: 147, wherein the light chain variable domain includes a histidine at position 95 in SEQ ID NO: 147; and a heavy chain variable domain that is at least 90% (e.g., at least 92%, at least 94%, at least 96%, at least 98%, at least 99%, or 100%) identical to SEQ ID NO: 146, where the heavy chain variable domain includes a histidine at any of the specific combinations of one or more amino acid positions in SEQ ID NO: 146 listed in Table 3.

[0309] In some examples of any of the ABPCs described herein, the first antigen-binding domain comprises a light chain variable domain that is at least 90% identical to SEQ ID NO: 147, wherein the light chain variable domain includes a histidine at position 96 in SEQ ID NO: 147; and a heavy chain variable domain that is at least 90% (e.g., at least 92%, at least 94%, at least 96%, at least 98%, at least 99%, or 100%) identical to SEQ ID NO: 146, where the heavy chain variable domain includes a histidine at any of the specific combinations of one or more amino acid positions in SEQ ID NO: 146 listed in Table 3.

[0310] In some examples of any of the ABPCs described herein, the first antigen-binding domain comprises a light chain variable domain that is at least 90% identical to SEQ ID NO: 147, wherein the light chain variable domain includes a histidine at position 97 in SEQ ID NO: 147; and a heavy chain variable domain that is at least 90% (e.g., at least 92%, at least 94%, at least 96%, at least 98%, at least 99%, or 100%) identical to SEQ ID NO: 146, where the heavy chain variable domain includes a histidine at any of the specific combinations of one or more amino acid positions in SEQ ID NO: 146 listed in Table 3.

[0311] In some examples of any of the ABPCs described herein, the first antigen-binding domain comprises a light chain variable domain that is at least 90% identical to SEQ ID NO: 147, wherein the light chain variable domain includes an alanine at position 35 in SEQ ID NO: 2; and a heavy chain variable domain that is at least 90% (e.g., at least 92%, at least 94%, at least 96%, at least 98%, at least 99%, or 100%) identical to SEQ ID NO: 146, where the heavy chain variable domain includes a histidine at any of the specific combinations of one or more amino acid positions in SEQ ID NO: 146 listed in Table 3.

[0312] In some examples of any of the ABPCs described herein, the first antigen-binding domain includes a heavy chain variable domain of Emibetuzumab with one or more (e.g., one, two, three, four, five, six, seven, eight, nine, ten, eleven, twelve, thirteen, fourteen, fifteen, sixteen, seventeen, eighteen, nineteen, or twenty) histidine(s) substituted with an alanine. In some examples of any of the ABPCs described herein, the first antigen-binding domain includes a light chain variable domain of Emibetuzumab with one or more (e.g., one, two, three, four, five, six, seven, eight, nine, ten, eleven, twelve, thirteen, fourteen, fifteen, sixteen, seventeen, eighteen, nineteen, or twenty) histidine(s) substituted with an alanine. In some examples of any of the ABPCs described herein, the first antigen-binding domain includes a heavy chain variable domain of Emibetuzumab with one or more (e.g., one, two, three, four, five, six, seven, eight, nine, ten, eleven, twelve, thirteen, fourteen, fifteen, sixteen, seventeen, eighteen, nineteen, or twenty) histidines substituted with an alanine; and a light chain variable domain of Emibetuzumab with one or more (e.g., one, two, three, four, five, six, seven, eight, nine, ten, eleven, twelve, thirteen, fourteen, fifteen, sixteen, seventeen, eighteen, nineteen, or twenty) histidine(s) substituted with an alanine. In some examples of any of the ABPCs described herein, the heavy chain variable domain of Emibetuzumab comprises SEQ ID NO: 146. In some examples of any of the ABPCs described herein, the light chain variable domain of Emibetuzumab comprises SEQ ID NO: 147.

[0313] In some examples of any of the ABPCs described herein, the first antigen-binding domain comprises a heavy chain variable domain comprising a CDR1, a CDR2, and a CDR3 of SEQ ID NO: 148, SEQ ID NO: 149, and SEQ ID NO: 150, respectively, with collectively a total of one or more (e.g., one, two, three, four, five, six, seven, eight, nine, or ten) histidine(s) in SEQ ID NOs: 148-150 substituted with an alanine. In some examples of any of the ABPCs described herein, the first antigen-binding domain comprises a light chain variable domain comprising a CDR1, a CDR2, and a CDR3 of SEQ ID NO: 151, SEQ ID NO: 152, and SEQ ID NO: 153, respectively, with collectively a total of one or more (e.g., one, two, three, four, five, six, seven, eight, nine, or ten) histidine(s) in SEQ ID NOs: 151-153 substituted with an alanine. In some examples of any of the ABPCs described herein, the first antigen-binding domain includes: a heavy chain variable domain comprising a CDR1, a CDR2, and a CDR3 of SEQ ID NO: 148, SEQ ID NO: 149, and SEQ ID NO: 150, respectively, with collectively a total of one or more (e.g., one, two, three, four, five, six, seven, eight, nine, or ten) histidine(s) in SEQ ID NOs: 148-150 substituted with an alanine; and a light chain variable domain comprising a CDR1, a CDR2, and a CDR3 of SEQ ID NO: 151, SEQ ID NO: 152, and SEQ ID NO: 153, respectively, with collectively a total of one or more (e.g., one, two, three, four, five, six, seven, eight, nine, or ten) histidine(s) in SEQ ID NOs: 151-153 substituted with an alanine.

[0314] In some examples of any of the ABPCs described herein, the first antigen-binding domain comprises a heavy chain variable domain of SEQ ID NO: 146, SEQ ID NO: 154, SEQ ID NO: 155, SEQ ID NO: 156, SEQ ID NO: 157, SEQ ID NO: 158, SEQ ID NO: 159, SEQ ID NO: 160, SEQ ID NO: 161, SEQ ID NO: 162, SEQ ID NO: 163, SEQ ID NO: 164, SEQ ID NO: 165, SEQ ID NO: 166, SEQ ID NO: 167, SEQ ID NO: 168, SEQ ID NO: 169, SEQ ID NO: 170, SEQ ID NO: 171, SEQ ID NO: 172, SEQ ID NO: 173, SEQ ID NO: 174, SEQ ID NO: 175, SEQ ID NO: 176, SEQ ID NO: 177, SEQ ID NO: 178, SEQ ID NO: 179, SEQ ID NO: 180, SEQ ID NO: 181, SEQ ID NO: 182, SEQ ID NO: 183, SEQ ID NO: 184, SEQ ID NO: 185, SEQ ID NO: 186, SEQ ID NO: 187, or SEQ ID NO: 188.

[0315] In some examples of any of the ABPCs described herein, the first antigen-binding domain includes a light chain variable domain of SEQ ID NO: 147, SEQ ID NO: 189, SEQ ID NO: 190, SEQ ID NO: 191, SEQ ID NO: 192, SEQ ID NO: 193, SEQ ID NO: 194, SEQ ID NO: 195, SEQ ID NO: 196, SEQ ID NO: 197, SEQ ID NO: 198, SEQ ID NO: 199, SEQ ID NO: 200, SEQ ID NO: 201, SEQ ID NO: 202, SEQ ID NO: 203, SEQ ID NO: 204, SEQ ID NO: 205, SEQ ID NO: 206, SEQ ID NO: 207, SEQ ID NO: 208, SEQ ID NO: 209, SEQ ID NO: 210, SEQ ID NO: 211, SEQ ID NO: 212, SEQ ID NO: 213, SEQ ID NO: 214, SEQ ID NO: 215, or SEQ ID NO: 216.

[0316] In some examples of any of the ABPCs described herein, the first antigen-binding domain includes a light chain variable domain comprising SEQ ID NO: 147, and a heavy chain variable domain comprising: of SEQ ID NO: 154, SEQ ID NO: 155, SEQ ID NO: 156, SEQ ID NO: 157, SEQ ID NO: 158, SEQ ID NO: 159, SEQ ID NO: 160, SEQ ID NO: 161, SEQ ID NO: 162, SEQ ID NO: 163, SEQ ID NO: 164, SEQ ID NO: 165, SEQ ID NO: 166, SEQ ID NO: 167, SEQ ID NO: 168, SEQ ID NO: 169, SEQ ID NO: 170, SEQ ID NO: 171, SEQ ID NO: 172, SEQ ID NO: 173, SEQ ID NO: 174, SEQ ID NO: 175, SEQ ID NO: 176, SEQ ID NO: 177, SEQ ID NO: 178, SEQ ID NO: 179, SEQ ID NO: 180, SEQ ID NO: 181, SEQ ID NO: 182, SEQ ID NO: 183, SEQ ID NO: 184, SEQ ID NO: 185, SEQ ID NO: 186, SEQ ID NO: 187, or SEQ ID NO: 188.

[0317] In some examples of any of the ABPCs described herein, the first antigen-binding domain includes a light chain variable domain comprising SEQ ID NO: 189, and a heavy chain variable domain comprising: of SEQ ID NO: 146, SEQ ID NO: 154, SEQ ID NO: 155, SEQ ID NO: 156, SEQ ID NO: 157, SEQ ID NO: 158, SEQ ID NO: 159, SEQ ID NO: 160, SEQ ID NO: 161, SEQ ID NO: 162, SEQ ID NO: 163, SEQ ID NO: 164, SEQ ID NO: 165, SEQ ID NO: 166, SEQ ID NO: 167, SEQ ID NO: 168, SEQ ID NO: 169, SEQ ID NO: 170, SEQ ID NO: 171, SEQ ID NO: 172, SEQ ID NO: 173, SEQ ID NO: 174, SEQ ID NO: 175, SEQ ID NO: 176, SEQ ID NO: 177, SEQ ID NO: 178, SEQ ID NO: 179, SEQ ID NO: 180, SEQ ID NO: 181, SEQ ID NO: 182, SEQ ID NO: 183, SEQ ID NO: 184, SEQ ID NO: 185, SEQ ID NO: 186, SEQ ID NO: 187, or SEQ ID NO: 188.

[0318] In some examples of any of the ABPCs described herein, the first antigen-binding domain includes a light chain variable domain comprising SEQ ID NO: 190, and a heavy chain variable domain comprising: of SEQ ID NO: 146, SEQ ID NO: 154, SEQ ID NO: 155, SEQ ID NO: 156, SEQ ID NO: 157, SEQ ID NO: 158, SEQ ID NO: 159, SEQ ID NO: 160, SEQ ID NO: 161, SEQ ID NO: 162, SEQ ID NO: 163, SEQ ID NO: 164, SEQ ID NO: 165, SEQ ID NO: 166, SEQ ID NO: 167, SEQ ID NO: 168, SEQ ID NO: 169, SEQ ID NO: 170, SEQ ID NO: 171, SEQ ID NO: 172, SEQ ID NO: 173, SEQ ID NO: 174, SEQ ID NO: 175, SEQ ID NO: 176, SEQ ID NO: 177, SEQ ID NO: 178, SEQ ID NO: 179, SEQ ID NO: 180, SEQ ID NO: 181, SEQ ID NO: 182, SEQ ID NO: 183, SEQ ID NO: 184, SEQ ID NO: 185, SEQ ID NO: 186, SEQ ID NO: 187, or SEQ ID NO: 188.

[0319] In some examples of any of the ABPCs described herein, the first antigen-binding domain includes a light chain variable domain comprising SEQ ID NO: 191, and a heavy chain variable domain comprising: of SEQ ID NO: 146, SEQ ID NO: 154, SEQ ID NO: 155, SEQ ID NO: 156, SEQ ID NO: 157, SEQ ID NO: 158, SEQ ID NO: 159, SEQ ID NO: 160, SEQ ID NO: 161, SEQ ID NO: 162, SEQ ID NO: 163, SEQ ID NO: 164, SEQ ID NO: 165, SEQ ID NO: 166, SEQ ID NO: 167, SEQ ID NO: 168, SEQ ID NO: 169, SEQ ID NO: 170, SEQ ID NO: 171, SEQ ID NO: 172, SEQ ID NO: 173, SEQ ID NO: 174, SEQ ID NO: 175, SEQ ID NO: 176, SEQ ID NO: 177, SEQ ID NO: 178, SEQ ID NO: 179, SEQ ID NO: 180, SEQ ID NO: 181, SEQ ID NO: 182, SEQ ID NO: 183, SEQ ID NO: 184, SEQ ID NO: 185, SEQ ID NO: 186, SEQ ID NO: 187, or SEQ ID NO: 188.

[0320] In some examples of any of the ABPCs described herein, the first antigen-binding domain includes a light chain variable domain comprising SEQ ID NO: 192, and a heavy chain variable domain comprising: of SEQ ID NO: 146, SEQ ID NO: 154, SEQ ID NO: 155, SEQ ID NO: 156, SEQ ID NO: 157, SEQ ID NO: 158, SEQ ID NO: 159, SEQ ID NO: 160, SEQ ID NO: 161, SEQ ID NO: 162, SEQ ID NO: 163, SEQ ID NO: 164, SEQ ID NO: 165, SEQ ID NO: 166, SEQ ID NO: 167, SEQ ID NO: 168, SEQ ID NO: 169, SEQ ID NO: 170, SEQ ID NO: 171, SEQ ID NO: 172, SEQ ID NO: 173, SEQ ID NO: 174, SEQ ID NO: 175, SEQ ID NO: 176, SEQ ID NO: 177, SEQ ID NO: 178, SEQ ID NO: 179, SEQ ID NO: 180, SEQ ID NO: 181, SEQ ID NO: 182, SEQ ID NO: 183, SEQ ID NO: 184, SEQ ID NO: 185, SEQ ID NO: 186, SEQ ID NO: 187, or SEQ ID NO: 188.

[0321] In some examples of any of the ABPCs described herein, the first antigen-binding domain includes a light chain variable domain comprising SEQ ID NO: 193, and a heavy chain variable domain comprising: of SEQ ID NO: 146, SEQ ID NO: 154, SEQ ID NO: 155, SEQ ID NO: 156, SEQ ID NO: 157, SEQ ID NO: 158, SEQ ID NO: 159, SEQ ID NO: 160, SEQ ID NO: 161, SEQ ID NO: 162, SEQ ID NO: 163, SEQ ID NO: 164, SEQ ID NO: 165, SEQ ID NO: 166, SEQ ID NO: 167, SEQ ID NO: 168, SEQ ID NO: 169, SEQ ID NO: 170, SEQ ID NO: 171, SEQ ID NO: 172, SEQ ID NO: 173, SEQ ID NO: 174, SEQ ID NO: 175, SEQ ID NO: 176, SEQ ID NO: 177, SEQ ID NO: 178, SEQ ID NO: 179, SEQ ID NO: 180, SEQ ID NO: 181, SEQ ID NO: 182, SEQ ID NO: 183, SEQ ID NO: 184, SEQ ID NO: 185, SEQ ID NO: 186, SEQ ID NO: 187, or SEQ ID NO: 188.

[0322] In some examples of any of the ABPCs described herein, the first antigen-binding domain includes a light chain variable domain comprising SEQ ID NO: 194, and a heavy chain variable domain comprising: of SEQ ID NO: 146, SEQ ID NO: 154, SEQ ID NO: 155, SEQ ID NO: 156, SEQ ID NO: 157, SEQ ID NO: 158, SEQ ID NO: 159, SEQ ID NO: 160, SEQ ID NO: 161, SEQ ID NO: 162, SEQ ID NO: 163, SEQ ID NO: 164, SEQ ID NO: 165, SEQ ID NO: 166, SEQ ID NO: 167, SEQ ID NO: 168, SEQ ID NO: 169, SEQ ID NO: 170, SEQ ID NO: 171, SEQ ID NO: 172, SEQ ID NO: 173, SEQ ID NO: 174, SEQ ID NO: 175, SEQ ID NO: 176, SEQ ID NO: 177, SEQ ID NO: 178, SEQ ID NO: 179, SEQ ID NO: 180, SEQ ID NO: 181, SEQ ID NO: 182, SEQ ID NO: 183, SEQ ID NO: 184, SEQ ID NO: 185, SEQ ID NO: 186, SEQ ID NO: 187, or SEQ ID NO: 188.

[0323] In some examples of any of the ABPCs described herein, the first antigen-binding domain includes a light chain variable domain comprising SEQ ID NO: 195, and a heavy chain variable domain comprising: of SEQ ID NO: 146, SEQ ID NO: 154, SEQ ID NO: 155, SEQ ID NO: 156, SEQ ID NO: 157, SEQ ID NO: 158, SEQ ID NO: 159, SEQ ID NO: 160, SEQ ID NO: 161, SEQ ID NO: 162, SEQ ID NO: 163, SEQ ID NO: 164, SEQ ID NO: 165, SEQ ID NO: 166, SEQ ID NO: 167, SEQ ID NO: 168, SEQ ID NO: 169, SEQ ID NO: 170, SEQ ID NO: 171, SEQ ID NO: 172, SEQ ID NO: 173, SEQ ID NO: 174, SEQ ID NO: 175, SEQ ID NO: 176, SEQ ID NO: 177, SEQ ID NO: 178, SEQ ID NO: 179, SEQ ID NO: 180, SEQ ID NO: 181, SEQ ID NO: 182, SEQ ID NO: 183, SEQ ID NO: 184, SEQ ID NO: 185, SEQ ID NO: 186, SEQ ID NO: 187, or SEQ ID NO: 188.

[0324] In some examples of any of the ABPCs described herein, the first antigen-binding domain includes a light chain variable domain comprising SEQ ID NO: 196, and a heavy chain variable domain comprising: of SEQ ID NO: 146, SEQ ID NO: 154, SEQ ID NO: 155, SEQ ID NO: 156, SEQ ID NO: 157, SEQ ID NO: 158, SEQ ID NO: 159, SEQ ID NO: 160, SEQ ID NO: 161, SEQ ID NO: 162, SEQ ID NO: 163, SEQ ID NO: 164, SEQ ID NO: 165, SEQ ID NO: 166, SEQ ID NO: 167, SEQ ID NO: 168, SEQ ID NO: 169, SEQ ID NO: 170, SEQ ID NO: 171, SEQ ID NO: 172, SEQ ID NO: 173, SEQ ID NO: 174, SEQ ID NO: 175, SEQ ID NO: 176, SEQ ID NO: 177, SEQ ID NO: 178, SEQ ID NO: 179, SEQ ID NO: 180, SEQ ID NO: 181, SEQ ID NO: 182, SEQ ID NO: 183, SEQ ID NO: 184, SEQ ID NO: 185, SEQ ID NO: 186, SEQ ID NO: 187, or SEQ ID NO: 188.

[0325] In some examples of any of the ABPCs described herein, the first antigen-binding domain includes a light chain variable domain comprising SEQ ID NO: 197, and a heavy chain variable domain comprising: of SEQ ID NO: 146, SEQ ID NO: 154, SEQ ID NO: 155, SEQ ID NO: 156, SEQ ID NO: 157, SEQ ID NO: 158, SEQ ID NO: 159, SEQ ID NO: 160, SEQ ID NO: 161, SEQ ID NO: 162, SEQ ID NO: 163, SEQ ID NO: 164, SEQ ID NO: 165, SEQ ID NO: 166, SEQ ID NO: 167, SEQ ID NO: 168, SEQ ID NO: 169, SEQ ID NO: 170, SEQ ID NO: 171, SEQ ID NO: 172, SEQ ID NO: 173, SEQ ID NO: 174, SEQ ID NO: 175, SEQ ID NO: 176, SEQ ID NO: 177, SEQ ID NO: 178, SEQ ID NO: 179, SEQ ID NO: 180, SEQ ID NO: 181, SEQ ID NO: 182, SEQ ID NO: 183, SEQ ID NO: 184, SEQ ID NO: 185, SEQ ID NO: 186, SEQ ID NO: 187, or SEQ ID NO: 188.

[0326] In some examples of any of the ABPCs described herein, the first antigen-binding domain includes a light chain variable domain comprising SEQ ID NO: 198, and a heavy chain variable domain comprising: of SEQ ID NO: 146, SEQ ID NO: 154, SEQ ID NO: 155, SEQ ID NO: 156, SEQ ID NO: 157, SEQ ID NO: 158, SEQ ID NO: 159, SEQ ID NO: 160, SEQ ID NO: 161, SEQ ID NO: 162, SEQ ID NO: 163, SEQ ID NO: 164, SEQ ID NO: 165, SEQ ID NO: 166, SEQ ID NO: 167, SEQ ID NO: 168, SEQ ID NO: 169, SEQ ID NO: 170, SEQ ID NO: 171, SEQ ID NO: 172, SEQ ID NO: 173, SEQ ID NO: 174, SEQ ID NO: 175, SEQ ID NO: 176, SEQ ID NO: 177, SEQ ID NO: 178, SEQ ID NO: 179, SEQ ID NO: 180, SEQ ID NO: 181, SEQ ID NO: 182, SEQ ID NO: 183, SEQ ID NO: 184, SEQ ID NO: 185, SEQ ID NO: 186, SEQ ID NO: 187, or SEQ ID NO: 188.

[0327] In some examples of any of the ABPCs described herein, the first antigen-binding domain includes a light chain variable domain comprising SEQ ID NO: 199, and a heavy chain variable domain comprising: of SEQ ID NO: 146, SEQ ID NO: 154, SEQ ID NO: 155, SEQ ID NO: 156, SEQ ID NO: 157, SEQ ID NO: 158, SEQ ID NO: 159, SEQ ID NO: 160, SEQ ID NO: 161, SEQ ID NO: 162, SEQ ID NO: 163, SEQ ID NO: 164, SEQ ID NO: 165, SEQ ID NO: 166, SEQ ID NO: 167, SEQ ID NO: 168, SEQ ID NO: 169, SEQ ID NO: 170, SEQ ID NO: 171, SEQ ID NO: 172, SEQ ID NO: 173, SEQ ID NO: 174, SEQ ID NO: 175, SEQ ID NO: 176, SEQ ID NO: 177, SEQ ID NO: 178, SEQ ID NO: 179, SEQ ID NO: 180, SEQ ID NO: 181, SEQ ID NO: 182, SEQ ID NO: 183, SEQ ID NO: 184, SEQ ID NO: 185, SEQ ID NO: 186, SEQ ID NO: 187, or SEQ ID NO: 188.

[0328] In some examples of any of the ABPCs described herein, the first antigen-binding domain includes a light chain variable domain comprising SEQ ID NO: 200, and a heavy chain variable domain comprising: of SEQ ID NO: 146, SEQ ID NO: 154, SEQ ID NO: 155, SEQ ID NO: 156, SEQ ID NO: 157, SEQ ID NO: 158, SEQ ID NO: 159, SEQ ID NO: 160, SEQ ID NO: 161, SEQ ID NO: 162, SEQ ID NO: 163, SEQ ID NO: 164, SEQ ID NO: 165, SEQ ID NO: 166, SEQ ID NO: 167, SEQ ID NO: 168, SEQ ID NO: 169, SEQ ID NO: 170, SEQ ID NO: 171, SEQ ID NO: 172, SEQ ID NO: 173, SEQ ID NO: 174, SEQ ID NO: 175, SEQ ID NO: 176, SEQ ID NO: 177, SEQ ID NO: 178, SEQ ID NO: 179, SEQ ID NO: 180, SEQ ID NO: 181, SEQ ID NO: 182, SEQ ID NO: 183, SEQ ID NO: 184, SEQ ID NO: 185, SEQ ID NO: 186, SEQ ID NO: 187, or SEQ ID NO: 188.

[0329] In some examples of any of the ABPCs described herein, the first antigen-binding domain includes a light chain variable domain comprising SEQ ID NO: 201, and a heavy chain variable domain comprising: of SEQ ID NO: 146, SEQ ID NO: 154, SEQ ID NO: 155, SEQ ID NO: 156, SEQ ID NO: 157, SEQ ID NO: 158, SEQ ID NO: 159, SEQ ID NO: 160, SEQ ID NO: 161, SEQ ID NO: 162, SEQ ID NO: 163, SEQ ID NO: 164, SEQ ID NO: 165, SEQ ID NO: 166, SEQ ID NO: 167, SEQ ID NO: 168, SEQ ID NO: 169, SEQ ID NO: 170, SEQ ID NO: 171, SEQ ID NO: 172, SEQ ID NO: 173, SEQ ID NO: 174, SEQ ID NO: 175, SEQ ID NO: 176, SEQ ID NO: 177, SEQ ID NO: 178, SEQ ID NO: 179, SEQ ID NO: 180, SEQ ID NO: 181, SEQ ID NO: 182, SEQ ID NO: 183, SEQ ID NO: 184, SEQ ID NO: 185, SEQ ID NO: 186, SEQ ID NO: 187, or SEQ ID NO: 188.

[0330] In some examples of any of the ABPCs described herein, the first antigen-binding domain includes a light chain variable domain comprising SEQ ID NO: 202, and a heavy chain variable domain comprising: of SEQ ID NO: 146, SEQ ID NO: 154, SEQ ID NO: 155, SEQ ID NO: 156, SEQ ID NO: 157, SEQ ID NO: 158, SEQ ID NO: 159, SEQ ID NO: 160, SEQ ID NO: 161, SEQ ID NO: 162, SEQ ID NO: 163, SEQ ID NO: 164, SEQ ID NO: 165, SEQ ID NO: 166, SEQ ID NO: 167, SEQ ID NO: 168, SEQ ID NO: 169, SEQ ID NO: 170, SEQ ID NO: 171, SEQ ID NO: 172, SEQ ID NO: 173, SEQ ID NO: 174, SEQ ID NO: 175, SEQ ID NO: 176, SEQ ID NO: 177, SEQ ID NO: 178, SEQ ID NO: 179, SEQ ID NO: 180, SEQ ID NO: 181, SEQ ID NO: 182, SEQ ID NO: 183, SEQ ID NO: 184, SEQ ID NO: 185, SEQ ID NO: 186, SEQ ID NO: 187, or SEQ ID NO: 188.

[0331] In some examples of any of the ABPCs described herein, the first antigen-binding domain includes a light chain variable domain comprising SEQ ID NO: 203, and a heavy chain variable domain comprising: of SEQ ID NO: 146, SEQ ID NO: 154, SEQ ID NO: 155, SEQ ID NO: 156, SEQ ID NO: 157, SEQ ID NO: 158, SEQ ID NO: 159, SEQ ID NO: 160, SEQ ID NO: 161, SEQ ID NO: 162, SEQ ID NO: 163, SEQ ID NO: 164, SEQ ID NO: 165, SEQ ID NO: 166, SEQ ID NO: 167, SEQ ID NO: 168, SEQ ID NO: 169, SEQ ID NO: 170, SEQ ID NO: 171, SEQ ID NO: 172, SEQ ID NO: 173, SEQ ID NO: 174, SEQ ID NO: 175, SEQ ID NO: 176, SEQ ID NO: 177, SEQ ID NO: 178, SEQ ID NO: 179, SEQ ID NO: 180, SEQ ID NO: 181, SEQ ID NO: 182, SEQ ID NO: 183, SEQ ID NO: 184, SEQ ID NO: 185, SEQ ID NO: 186, SEQ ID NO: 187, or SEQ ID NO: 188.

[0332] In some examples of any of the ABPCs described herein, the first antigen-binding domain includes a light chain variable domain comprising SEQ ID NO: 204, and a heavy chain variable domain comprising: of SEQ ID NO: 146, SEQ ID NO: 154, SEQ ID NO: 155, SEQ ID NO: 156, SEQ ID NO: 157, SEQ ID NO: 158, SEQ ID NO: 159, SEQ ID NO: 160, SEQ ID NO: 161, SEQ ID NO: 162, SEQ ID NO: 163, SEQ ID NO: 164, SEQ ID NO: 165, SEQ ID NO: 166, SEQ ID NO: 167, SEQ ID NO: 168, SEQ ID NO: 169, SEQ ID NO: 170, SEQ ID NO: 171, SEQ ID NO: 172, SEQ ID NO: 173, SEQ ID NO: 174, SEQ ID NO: 175, SEQ ID NO: 176, SEQ ID NO: 177, SEQ ID NO: 178, SEQ ID NO: 179, SEQ ID NO: 180, SEQ ID NO: 181, SEQ ID NO: 182, SEQ ID NO: 183, SEQ ID NO: 184, SEQ ID NO: 185, SEQ ID NO: 186, SEQ ID NO: 187, or SEQ ID NO: 188.

[0333] In some examples of any of the ABPCs described herein, the first antigen-binding domain includes a light chain variable domain comprising SEQ ID NO: 205, and a heavy chain variable domain comprising: of SEQ ID NO: 146, SEQ ID NO: 154, SEQ ID NO: 155, SEQ ID NO: 156, SEQ ID NO: 157, SEQ ID NO: 158, SEQ ID NO: 159, SEQ ID NO: 160, SEQ ID NO: 161, SEQ ID NO: 162, SEQ ID NO: 163, SEQ ID NO: 164, SEQ ID NO: 165, SEQ ID NO: 166, SEQ ID NO: 167, SEQ ID NO: 168, SEQ ID NO: 169, SEQ ID NO: 170, SEQ ID NO: 171, SEQ ID NO: 172, SEQ ID NO: 173, SEQ ID NO: 174, SEQ ID NO: 175, SEQ ID NO: 176, SEQ ID NO: 177, SEQ ID NO: 178, SEQ ID NO: 179, SEQ ID NO: 180, SEQ ID NO: 181, SEQ ID NO: 182, SEQ ID NO: 183, SEQ ID NO: 184, SEQ ID NO: 185, SEQ ID NO: 186, SEQ ID NO: 187, or SEQ ID NO: 188.

[0334] In some examples of any of the ABPCs described herein, the first antigen-binding domain includes a light chain variable domain comprising SEQ ID NO: 206, and a heavy chain variable domain comprising: of SEQ ID NO: 146, SEQ ID NO: 154, SEQ ID NO: 155, SEQ ID NO: 156, SEQ ID NO: 157, SEQ ID NO: 158, SEQ ID NO: 159, SEQ ID NO: 160, SEQ ID NO: 161, SEQ ID NO: 162, SEQ ID NO: 163, SEQ ID NO: 164, SEQ ID NO: 165, SEQ ID NO: 166, SEQ ID NO: 167, SEQ ID NO: 168, SEQ ID NO: 169, SEQ ID NO: 170, SEQ ID NO: 171, SEQ ID NO: 172, SEQ ID NO: 173, SEQ ID NO: 174, SEQ ID NO: 175, SEQ ID NO: 176, SEQ ID NO: 177, SEQ ID NO: 178, SEQ ID NO: 179, SEQ ID NO: 180, SEQ ID NO: 181, SEQ ID NO: 182, SEQ ID NO: 183, SEQ ID NO: 184, SEQ ID NO: 185, SEQ ID NO: 186, SEQ ID NO: 187, or SEQ ID NO: 188.

[0335] In some examples of any of the ABPCs described herein, the first antigen-binding domain includes a light chain variable domain comprising SEQ ID NO: 207, and a heavy chain variable domain comprising: of SEQ ID NO: 146, SEQ ID NO: 154, SEQ ID NO: 155, SEQ ID NO: 156, SEQ ID NO: 157, SEQ ID NO: 158, SEQ ID NO: 159, SEQ ID NO: 160, SEQ ID NO: 161, SEQ ID NO: 162, SEQ ID NO: 163, SEQ ID NO: 164, SEQ ID NO: 165, SEQ ID NO: 166, SEQ ID NO: 167, SEQ ID NO: 168, SEQ ID NO: 169, SEQ ID NO: 170, SEQ ID NO: 171, SEQ ID NO: 172, SEQ ID NO: 173, SEQ ID NO: 174, SEQ ID NO: 175, SEQ ID NO: 176, SEQ ID NO: 177, SEQ ID NO: 178, SEQ ID NO: 179, SEQ ID NO: 180, SEQ ID NO: 181, SEQ ID NO: 182, SEQ ID NO: 183, SEQ ID NO: 184, SEQ ID NO: 185, SEQ ID NO: 186, SEQ ID NO: 187, or SEQ ID NO: 188.

[0336] In some examples of any of the ABPCs described herein, the first antigen-binding domain includes a light chain variable domain comprising SEQ ID NO: 208, and a heavy chain variable domain comprising: of SEQ ID NO: 146, SEQ ID NO: 154, SEQ ID NO: 155, SEQ ID NO: 156, SEQ ID NO: 157, SEQ ID NO: 158, SEQ ID NO: 159, SEQ ID NO: 160, SEQ ID NO: 161, SEQ ID NO: 162, SEQ ID NO: 163, SEQ ID NO: 164, SEQ ID NO: 165, SEQ ID NO: 166, SEQ ID NO: 167, SEQ ID NO: 168, SEQ ID NO: 169, SEQ ID NO: 170, SEQ ID NO: 171, SEQ ID NO: 172, SEQ ID NO: 173, SEQ ID NO: 174, SEQ ID NO: 175, SEQ ID NO: 176, SEQ ID NO: 177, SEQ ID NO: 178, SEQ ID NO: 179, SEQ ID NO: 180, SEQ ID NO: 181, SEQ ID NO: 182, SEQ ID NO: 183, SEQ ID NO: 184, SEQ ID NO: 185, SEQ ID NO: 186, SEQ ID NO: 187, or SEQ ID NO: 188.

[0337] In some examples of any of the ABPCs described herein, the first antigen-binding domain includes a light chain variable domain comprising SEQ ID NO: 209, and a heavy chain variable domain comprising: of SEQ ID NO: 146, SEQ ID NO: 154, SEQ ID NO: 155, SEQ ID NO: 156, SEQ ID NO: 157, SEQ ID NO: 158, SEQ ID NO: 159, SEQ ID NO: 160, SEQ ID NO: 161, SEQ ID NO: 162, SEQ ID NO: 163, SEQ ID NO: 164, SEQ ID NO: 165, SEQ ID NO: 166, SEQ ID NO: 167, SEQ ID NO: 168, SEQ ID NO: 169, SEQ ID NO: 170, SEQ ID NO: 171, SEQ ID NO: 172, SEQ ID NO: 173, SEQ ID NO: 174, SEQ ID NO: 175, SEQ ID NO: 176, SEQ ID NO: 177, SEQ ID NO: 178, SEQ ID NO: 179, SEQ ID NO: 180, SEQ ID NO: 181, SEQ ID NO: 182, SEQ ID NO: 183, SEQ ID NO: 184, SEQ ID NO: 185, SEQ ID NO: 186, SEQ ID NO: 187, or SEQ ID NO: 188.

[0338] In some examples of any of the ABPCs described herein, the first antigen-binding domain includes a light chain variable domain comprising SEQ ID NO: 210, and a heavy chain variable domain comprising: of SEQ ID NO: 146, SEQ ID NO: 154, SEQ ID NO: 155, SEQ ID NO: 156, SEQ ID NO: 157, SEQ ID NO: 158, SEQ ID NO: 159, SEQ ID NO: 160, SEQ ID NO: 161, SEQ ID NO: 162, SEQ ID NO: 163, SEQ ID NO: 164, SEQ ID NO: 165, SEQ ID NO: 166, SEQ ID NO: 167, SEQ ID NO: 168, SEQ ID NO: 169, SEQ ID NO: 170, SEQ ID NO: 171, SEQ ID NO: 172, SEQ ID NO: 173, SEQ ID NO: 174, SEQ ID NO: 175, SEQ ID NO: 176, SEQ ID NO: 177, SEQ ID NO: 178, SEQ ID NO: 179, SEQ ID NO: 180, SEQ ID NO: 181, SEQ ID NO: 182, SEQ ID NO: 183, SEQ ID NO: 184, SEQ ID NO: 185, SEQ ID NO: 186, SEQ ID NO: 187, or SEQ ID NO: 188.

[0339] In some examples of any of the ABPCs described herein, the first antigen-binding domain includes a light chain variable domain comprising SEQ ID NO: 211, and a heavy chain variable domain comprising: of SEQ ID NO: 146, SEQ ID NO: 154, SEQ ID NO: 155, SEQ ID NO: 156, SEQ ID NO: 157, SEQ ID NO: 158, SEQ ID NO: 159, SEQ ID NO: 160, SEQ ID NO: 161, SEQ ID NO: 162, SEQ ID NO: 163, SEQ ID NO: 164, SEQ ID NO: 165, SEQ ID NO: 166, SEQ ID NO: 167, SEQ ID NO: 168, SEQ ID NO: 169, SEQ ID NO: 170, SEQ ID NO: 171, SEQ ID NO: 172, SEQ ID NO: 173, SEQ ID NO: 174, SEQ ID NO: 175, SEQ ID NO: 176, SEQ ID NO: 177, SEQ ID NO: 178, SEQ ID NO: 179, SEQ ID NO: 180, SEQ ID NO: 181, SEQ ID NO: 182, SEQ ID NO: 183, SEQ ID NO: 184, SEQ ID NO: 185, SEQ ID NO: 186, SEQ ID NO: 187, or SEQ ID NO: 188.

[0340] In some examples of any of the ABPCs described herein, the first antigen-binding domain includes a light chain variable domain comprising SEQ ID NO: 212, and a heavy chain variable domain comprising: of SEQ ID NO: 146, SEQ ID NO: 154, SEQ ID NO: 155, SEQ ID NO: 156, SEQ ID NO: 157, SEQ ID NO: 158, SEQ ID NO: 159, SEQ ID NO: 160, SEQ ID NO: 161, SEQ ID NO: 162, SEQ ID NO: 163, SEQ ID NO: 164, SEQ ID NO: 165, SEQ ID NO: 166, SEQ ID NO: 167, SEQ ID NO: 168, SEQ ID NO: 169, SEQ ID NO: 170, SEQ ID NO: 171, SEQ ID NO: 172, SEQ ID NO: 173, SEQ ID NO: 174, SEQ ID NO: 175, SEQ ID NO: 176, SEQ ID NO: 177, SEQ ID NO: 178, SEQ ID NO: 179, SEQ ID NO: 180, SEQ ID NO: 181, SEQ ID NO: 182, SEQ ID NO: 183, SEQ ID NO: 184, SEQ ID NO: 185, SEQ ID NO: 186, SEQ ID NO: 187, or SEQ ID NO: 188.

[0341] In some examples of any of the ABPCs described herein, the first antigen-binding domain includes a light chain variable domain comprising SEQ ID NO: 213, and a heavy chain variable domain comprising: of SEQ ID NO: 146, SEQ ID NO: 154, SEQ ID NO: 155, SEQ ID NO: 156, SEQ ID NO: 157, SEQ ID NO: 158, SEQ ID NO: 159, SEQ ID NO: 160, SEQ ID NO: 161, SEQ ID NO: 162, SEQ ID NO: 163, SEQ ID NO: 164, SEQ ID NO: 165, SEQ ID NO: 166, SEQ ID NO: 167, SEQ ID NO: 168, SEQ ID NO: 169, SEQ ID NO: 170, SEQ ID NO: 171, SEQ ID NO: 172, SEQ ID NO: 173, SEQ ID NO: 174, SEQ ID NO: 175, SEQ ID NO: 176, SEQ ID NO: 177, SEQ ID NO: 178, SEQ ID NO: 179, SEQ ID NO: 180, SEQ ID NO: 181, SEQ ID NO: 182, SEQ ID NO: 183, SEQ ID NO: 184, SEQ ID NO: 185, SEQ ID NO: 186, SEQ ID NO: 187, or SEQ ID NO: 188.

[0342] In some examples of any of the ABPCs described herein, the first antigen-binding domain includes a light chain variable domain comprising SEQ ID NO: 214, and a heavy chain variable domain comprising: of SEQ ID NO: 146, SEQ ID NO: 154, SEQ ID NO: 155, SEQ ID NO: 156, SEQ ID NO: 157, SEQ ID NO: 158, SEQ ID NO: 159, SEQ ID NO: 160, SEQ ID NO: 161, SEQ ID NO: 162, SEQ ID NO: 163, SEQ ID NO: 164, SEQ ID NO: 165, SEQ ID NO: 166, SEQ ID NO: 167, SEQ ID NO: 168, SEQ ID NO: 169, SEQ ID NO: 170, SEQ ID NO: 171, SEQ ID NO: 172, SEQ ID NO: 173, SEQ ID NO: 174, SEQ ID NO: 175, SEQ ID NO: 176, SEQ ID NO: 177, SEQ ID NO: 178, SEQ ID NO: 179, SEQ ID NO: 180, SEQ ID NO: 181, SEQ ID NO: 182, SEQ ID NO: 183, SEQ ID NO: 184, SEQ ID NO: 185, SEQ ID NO: 186, SEQ ID NO: 187, or SEQ ID NO: 188.

[0343] In some examples of any of the ABPCs described herein, the first antigen-binding domain includes a light chain variable domain comprising SEQ ID NO: 215, and a heavy chain variable domain comprising: of SEQ ID NO: 146, SEQ ID NO: 154, SEQ ID NO: 155, SEQ ID NO: 156, SEQ ID NO: 157, SEQ ID NO: 158, SEQ ID NO: 159, SEQ ID NO: 160, SEQ ID NO: 161, SEQ ID NO: 162, SEQ ID NO: 163, SEQ ID NO: 164, SEQ ID NO: 165, SEQ ID NO: 166, SEQ ID NO: 167, SEQ ID NO: 168, SEQ ID NO: 169, SEQ ID NO: 170, SEQ ID NO: 171, SEQ ID NO: 172, SEQ ID NO: 173, SEQ ID NO: 174, SEQ ID NO: 175, SEQ ID NO: 176, SEQ ID NO: 177, SEQ ID NO: 178, SEQ ID NO: 179, SEQ ID NO: 180, SEQ ID NO: 181, SEQ ID NO: 182, SEQ ID NO: 183, SEQ ID NO: 184, SEQ ID NO: 185, SEQ ID NO: 186, SEQ ID NO: 187, or SEQ ID NO: 188.

[0344] In some examples of any of the ABPCs described herein, the first antigen-binding domain includes a light chain variable domain comprising SEQ ID NO: 216, and a heavy chain variable domain comprising: of SEQ ID NO: 146, SEQ ID NO: 154, SEQ ID NO: 155, SEQ ID NO: 156, SEQ ID NO: 157, SEQ ID NO: 158, SEQ ID NO: 159, SEQ ID NO: 160, SEQ ID NO: 161, SEQ ID NO: 162, SEQ ID NO: 163, SEQ ID NO: 164, SEQ ID NO: 165, SEQ ID NO: 166, SEQ ID NO: 167, SEQ ID NO: 168, SEQ ID NO: 169, SEQ ID NO: 170, SEQ ID NO: 171, SEQ ID NO: 172, SEQ ID NO: 173, SEQ ID NO: 174, SEQ ID NO: 175, SEQ ID NO: 176, SEQ ID NO: 177, SEQ ID NO: 178, SEQ ID NO: 179, SEQ ID NO: 180, SEQ ID NO: 181, SEQ ID NO: 182, SEQ ID NO: 183, SEQ ID NO: 184, SEQ ID NO: 185, SEQ ID NO: 186, SEQ ID NO: 187, or SEQ ID NO: 188.

[0345] In some examples of any of the ABPCs described herein, the first antigen-binding domain includes a heavy chain variable domain comprising SEQ ID NO: 217, SEQ ID NO: 218, SEQ ID NO: 219, SEQ ID NO: 220, SEQ ID NO: 221, SEQ ID NO: 222, SEQ ID NO: 223, SEQ ID NO: 224, SEQ ID NO: 225, SEQ ID NO: 226, SEQ ID NO: 227, SEQ ID NO: 228, SEQ ID NO: 229, SEQ ID NO: 230, SEQ ID NO: 231, SEQ ID NO: 232, SEQ ID NO: 233, SEQ ID NO: 234, SEQ ID NO: 235, SEQ ID NO: 236, SEQ ID NO: 237, SEQ ID NO: 238, SEQ ID NO: 239, SEQ ID NO: 240, SEQ ID NO: 241, SEQ ID NO: 242, SEQ ID NO: 243, SEQ ID NO: 244, SEQ ID NO: 245, SEQ ID NO: 246, SEQ ID NO: 247, SEQ ID NO: 248, SEQ ID NO: 249, SEQ ID NO: 250, SEQ ID NO: 251, SEQ ID NO: 252, SEQ ID NO: 253, SEQ ID NO: 254, SEQ ID NO: 255, SEQ ID NO: 256, SEQ ID NO: 257, SEQ ID NO: 258, SEQ ID NO: 259, SEQ ID NO: 260, SEQ ID NO: 261, SEQ ID NO: 262, SEQ ID NO: 263, SEQ ID NO: 264, SEQ ID NO: 265, SEQ ID NO: 266, SEQ ID NO: 267, SEQ ID NO: 268, SEQ ID NO: 269, SEQ ID NO: 270, SEQ ID NO: 271, SEQ ID NO: 272, SEQ ID NO: 273, SEQ ID NO: 274, SEQ ID NO: 275, SEQ ID NO: 276, SEQ ID NO: 277, SEQ ID NO: 278, SEQ ID NO: 279, SEQ ID NO: 280, SEQ ID NO: 281, SEQ ID NO: 282, or SEQ ID NO: 283.

[0346] In some examples of any of the ABPCs described herein, the first antigen-binding domain includes a light chain variable domain comprising SEQ ID NO: 147, and a heavy

[0347] In some examples of any of the ABPCs described herein, the first antigen-binding domain includes a light chain variable domain comprising SEQ ID NO: 189, and a heavy chain variable domain comprising SEQ ID NO: 217, SEQ ID NO: 218, SEQ ID NO: 219, SEQ ID NO: 220, SEQ ID NO: 221, SEQ ID NO: 222, SEQ ID NO: 223, SEQ ID NO: 224, SEQ ID NO: 225, SEQ ID NO: 226, SEQ ID NO: 227, SEQ ID NO: 228, SEQ ID NO: 229, SEQ ID NO: 230, SEQ ID NO: 231, SEQ ID NO: 232, SEQ ID NO: 233, SEQ ID NO: 234, SEQ ID NO: 235, SEQ ID NO: 236, SEQ ID NO: 237, SEQ ID NO: 238, SEQ ID NO: 239, SEQ ID NO: 240, SEQ ID NO: 241, SEQ ID NO: 242, SEQ ID NO: 243, SEQ ID NO: 244, SEQ ID NO: 245, SEQ ID NO: 246, SEQ ID NO: 247, SEQ ID NO: 248, SEQ ID NO: 249, SEQ ID NO: 250, SEQ ID NO: 251, SEQ ID NO: 252, SEQ ID NO: 253, SEQ ID NO: 254, SEQ ID NO: 255, SEQ ID NO: 256, SEQ ID NO: 257, SEQ ID NO: 258, SEQ ID NO: 259, SEQ ID NO: 260, SEQ ID NO: 261, SEQ ID NO: 262, SEQ ID NO: 263, SEQ ID NO: 264, SEQ ID NO: 265, SEQ ID NO: 266, SEQ ID NO: 267, SEQ ID NO: 268, SEQ ID NO: 269, SEQ ID NO: 270, SEQ ID NO: 271, SEQ ID NO: 272, SEQ ID NO: 273, SEQ ID NO: 274, SEQ ID NO: 275, SEQ ID NO: 276, SEQ ID NO: 277, SEQ ID NO: 278, SEQ ID NO: 279, SEQ ID NO: 280, SEQ ID NO: 281, SEQ ID NO: 282, or SEQ ID NO: 283.

[0348] In some examples of any of the ABPCs described herein, the first antigen-binding domain includes a light chain variable domain comprising SEQ ID NO: 190, and a heavy chain variable domain comprising SEQ ID NO: 217, SEQ ID NO: 218, SEQ ID NO: 219, SEQ ID NO: 220, SEQ ID NO: 221, SEQ ID NO: 222, SEQ ID NO: 223, SEQ ID NO: 224, SEQ ID NO: 225, SEQ ID NO: 226, SEQ ID NO: 227, SEQ ID NO: 228, SEQ ID NO: 229, SEQ ID NO: 230, SEQ ID NO: 231, SEQ ID NO: 232, SEQ ID NO: 233, SEQ ID NO: 234, SEQ ID NO: 235, SEQ ID NO: 236, SEQ ID NO: 237, SEQ ID NO: 238, SEQ ID NO: 239, SEQ ID NO: 240, SEQ ID NO: 241, SEQ ID NO: 242, SEQ ID NO: 243, SEQ ID NO: 244, SEQ ID NO: 245, SEQ ID NO: 246, SEQ ID NO: 247, SEQ ID NO: 248, SEQ ID NO: 249, SEQ ID NO: 250, SEQ ID NO: 251, SEQ ID NO: 252, SEQ ID NO: 253, SEQ ID NO: 254, SEQ ID NO: 255, SEQ ID NO: 256, SEQ ID NO: 257, SEQ ID NO: 258, SEQ ID NO: 259, SEQ ID NO: 260, SEQ ID NO: 261, SEQ ID NO: 262, SEQ ID NO: 263, SEQ ID NO: 264, SEQ ID NO: 265, SEQ ID NO: 266, SEQ ID NO: 267, SEQ ID NO: 268, SEQ ID NO: 269, SEQ ID NO: 270, SEQ ID NO: 271, SEQ ID NO: 272, SEQ ID NO: 273, SEQ ID NO: 274, SEQ ID NO: 275, SEQ ID NO: 276, SEQ ID NO: 277, SEQ ID NO: 278, SEQ ID NO: 279, SEQ ID NO: 280, SEQ ID NO: 281, SEQ ID NO: 282, or SEQ ID NO: 283.

[0349] In some examples of any of the ABPCs described herein, the first antigen-binding domain includes a light chain variable domain comprising SEQ ID NO: 191, and a heavy chain variable domain comprising SEQ ID NO: 217, SEQ ID NO: 218, SEQ ID NO: 219, SEQ ID NO: 220, SEQ ID NO: 221, SEQ ID NO: 222, SEQ ID NO: 223, SEQ ID NO: 224, SEQ ID NO: 225, SEQ ID NO: 226, SEQ ID NO: 227, SEQ ID NO: 228, SEQ ID NO: 229, SEQ ID NO: 230, SEQ ID NO: 231, SEQ ID NO: 232, SEQ ID NO: 233, SEQ ID NO: 234, SEQ ID NO: 235, SEQ ID NO: 236, SEQ ID NO: 237, SEQ ID NO: 238, SEQ ID NO: 239, SEQ ID NO: 240, SEQ ID NO: 241, SEQ ID NO: 242, SEQ ID NO: 243, SEQ ID NO: 244, SEQ ID NO: 245, SEQ ID NO: 246, SEQ ID NO: 247, SEQ ID NO: 248, SEQ ID NO: 249, SEQ ID NO: 250, SEQ ID NO: 251, SEQ ID NO: 252, SEQ ID NO: 253, SEQ ID NO: 254, SEQ ID NO: 255, SEQ ID NO: 256, SEQ ID NO: 257, SEQ ID NO: 258, SEQ ID NO: 259, SEQ ID NO: 260, SEQ ID NO: 261, SEQ ID NO: 262, SEQ ID NO: 263, SEQ ID NO: 264, SEQ ID NO: 265, SEQ ID NO: 266, SEQ ID NO: 267, SEQ ID NO: 268, SEQ ID NO: 269, SEQ ID NO: 270, SEQ ID NO: 271, SEQ ID NO: 272, SEQ ID NO: 273, SEQ ID NO: 274, SEQ ID NO: 275, SEQ ID NO: 276, SEQ ID NO: 277, SEQ ID NO: 278, SEQ ID NO: 279, SEQ ID NO: 280, SEQ ID NO: 281, SEQ ID NO: 282, or SEQ ID NO: 283.

[0350] In some examples of any of the ABPCs described herein, the first antigen-binding domain includes a light chain variable domain comprising SEQ ID NO: 192, and a heavy chain variable domain comprising SEQ ID NO: 217, SEQ ID NO: 218, SEQ ID NO: 219, SEQ ID NO: 220, SEQ ID NO: 221, SEQ ID NO: 222, SEQ ID NO: 223, SEQ ID NO: 224, SEQ ID NO: 225, SEQ ID NO: 226, SEQ ID NO: 227, SEQ ID NO: 228, SEQ ID NO: 229, SEQ ID NO: 230, SEQ ID NO: 231, SEQ ID NO: 232, SEQ ID NO: 233, SEQ ID NO: 234, SEQ ID NO: 235, SEQ ID NO: 236, SEQ ID NO: 237, SEQ ID NO: 238, SEQ ID NO: 239, SEQ ID NO: 240, SEQ ID NO: 241, SEQ ID NO: 242, SEQ ID NO: 243, SEQ ID NO: 244, SEQ ID NO: 245, SEQ ID NO: 246, SEQ ID NO: 247, SEQ ID NO: 248, SEQ ID NO: 249, SEQ ID NO: 250, SEQ ID NO: 251, SEQ ID NO: 252, SEQ ID NO: 253, SEQ ID NO: 254, SEQ ID NO: 255, SEQ ID NO: 256, SEQ ID NO: 257, SEQ ID NO: 258, SEQ ID NO: 259, SEQ ID NO: 260, SEQ ID NO: 261, SEQ ID NO: 262, SEQ ID NO: 263, SEQ ID NO: 264, SEQ ID NO: 265, SEQ ID NO: 266, SEQ ID NO: 267, SEQ ID NO: 268, SEQ ID NO: 269, SEQ ID NO: 270, SEQ ID NO: 271, SEQ ID NO: 272, SEQ ID NO: 273, SEQ ID NO: 274, SEQ ID NO: 275, SEQ ID NO: 276, SEQ ID NO: 277, SEQ ID NO: 278, SEQ ID NO: 279, SEQ ID NO: 280, SEQ ID NO: 281, SEQ ID NO: 282, or SEQ ID NO: 283.

[0351] In some examples of any of the ABPCs described herein, the first antigen-binding domain includes a light chain variable domain comprising SEQ ID NO: 193, and a heavy chain variable domain comprising SEQ ID NO: 217, SEQ ID NO: 218, SEQ ID NO: 219, SEQ ID NO: 220, SEQ ID NO: 221, SEQ ID NO: 222, SEQ ID NO: 223, SEQ ID NO: 224, SEQ ID NO: 225, SEQ ID NO: 226, SEQ ID NO: 227, SEQ ID NO: 228, SEQ ID NO: 229, SEQ ID NO: 230, SEQ ID NO: 231, SEQ ID NO: 232, SEQ ID NO: 233, SEQ ID NO: 234, SEQ ID NO: 235, SEQ ID NO: 236, SEQ ID NO: 237, SEQ ID NO: 238, SEQ ID NO: 239, SEQ ID NO: 240, SEQ ID NO: 241, SEQ ID NO: 242, SEQ ID NO: 243, SEQ ID NO: 244, SEQ ID NO: 245, SEQ ID NO: 246, SEQ ID NO: 247, SEQ ID NO: 248, SEQ ID NO: 249, SEQ ID NO: 250, SEQ ID NO: 251, SEQ ID NO: 252, SEQ ID NO: 253, SEQ ID NO: 254, SEQ ID NO: 255, SEQ ID NO: 256, SEQ ID NO: 257, SEQ ID NO: 258, SEQ ID NO: 259, SEQ ID NO: 260, SEQ ID NO: 261, SEQ ID NO: 262, SEQ ID NO: 263, SEQ ID NO: 264, SEQ ID NO: 265, SEQ ID NO: 266, SEQ ID NO: 267, SEQ ID NO: 268, SEQ ID NO: 269, SEQ ID NO: 270, SEQ ID NO: 271, SEQ ID NO: 272, SEQ ID NO: 273, SEQ ID NO: 274, SEQ ID NO: 275, SEQ ID NO: 276, SEQ ID NO: 277, SEQ ID NO: 278, SEQ ID NO: 279, SEQ ID NO: 280, SEQ ID NO: 281, SEQ ID NO: 282, or SEQ ID NO: 283.

[0352] In some examples of any of the ABPCs described herein, the first antigen-binding domain includes a light chain variable domain comprising SEQ ID NO: 194, and a heavy chain variable domain comprising SEQ ID NO: 217, SEQ ID NO: 218, SEQ ID NO: 219, SEQ ID NO: 220, SEQ ID NO: 221, SEQ ID NO: 222, SEQ ID NO: 223, SEQ ID NO: 224, SEQ ID NO: 225, SEQ ID NO: 226, SEQ ID NO: 227, SEQ ID NO: 228, SEQ ID NO: 229, SEQ ID NO: 230, SEQ ID NO: 231, SEQ ID NO: 232, SEQ ID NO: 233, SEQ ID NO: 234, SEQ ID NO: 235, SEQ ID NO: 236, SEQ ID NO: 237, SEQ ID NO: 238, SEQ ID NO: 239, SEQ ID NO: 240, SEQ ID NO: 241, SEQ ID NO: 242, SEQ ID NO: 243, SEQ ID NO: 244, SEQ ID NO: 245, SEQ ID NO: 246, SEQ ID NO: 247, SEQ ID NO: 248, SEQ ID NO: 249, SEQ ID NO: 250, SEQ ID NO: 251, SEQ ID NO: 252, SEQ ID NO: 253, SEQ ID NO: 254, SEQ ID NO: 255, SEQ ID NO: 256, SEQ ID NO: 257, SEQ ID NO: 258, SEQ ID NO: 259, SEQ ID NO: 260, SEQ ID NO: 261, SEQ ID NO: 262, SEQ ID NO: 263, SEQ ID NO: 264, SEQ ID NO: 265, SEQ ID NO: 266, SEQ ID NO: 267, SEQ ID NO: 268, SEQ ID NO: 269, SEQ ID NO: 270, SEQ ID NO: 271, SEQ ID NO: 272, SEQ ID NO: 273, SEQ ID NO: 274, SEQ ID NO: 275, SEQ ID NO: 276, SEQ ID NO: 277, SEQ ID NO: 278, SEQ ID NO: 279, SEQ ID NO: 280, SEQ ID NO: 281, SEQ ID NO: 282, or SEQ ID NO: 283.

[0353] In some examples of any of the ABPCs described herein, the first antigen-binding domain includes a light chain variable domain comprising SEQ ID NO: 195, and a heavy chain variable domain comprising SEQ ID NO: 217, SEQ ID NO: 218, SEQ ID NO: 219, SEQ ID NO: 220, SEQ ID NO: 221, SEQ ID NO: 222, SEQ ID NO: 223, SEQ ID NO: 224, SEQ ID NO: 225, SEQ ID NO: 226, SEQ ID NO: 227, SEQ ID NO: 228, SEQ ID NO: 229, SEQ ID NO: 230, SEQ ID NO: 231, SEQ ID NO: 232, SEQ ID NO: 233, SEQ ID NO: 234, SEQ ID NO: 235, SEQ ID NO: 236, SEQ ID NO: 237, SEQ ID NO: 238, SEQ ID NO: 239, SEQ ID NO: 240, SEQ ID NO: 241, SEQ ID NO: 242, SEQ ID NO: 243, SEQ ID NO: 244, SEQ ID NO: 245, SEQ ID NO: 246, SEQ ID NO: 247, SEQ ID NO: 248, SEQ ID NO: 249, SEQ ID NO: 250, SEQ ID NO: 251, SEQ ID NO: 252, SEQ ID NO: 253, SEQ ID NO: 254, SEQ ID NO: 255, SEQ ID NO: 256, SEQ ID NO: 257, SEQ ID NO: 258, SEQ ID NO: 259, SEQ ID NO: 260, SEQ ID NO: 261, SEQ ID NO: 262, SEQ ID NO: 263, SEQ ID NO: 264, SEQ ID NO: 265, SEQ ID NO: 266, SEQ ID NO: 267, SEQ ID NO: 268, SEQ ID NO: 269, SEQ ID NO: 270, SEQ ID NO: 271, SEQ ID NO: 272, SEQ ID NO: 273, SEQ ID NO: 274, SEQ ID NO: 275, SEQ ID NO: 276, SEQ ID NO: 277, SEQ ID NO: 278, SEQ ID NO: 279, SEQ ID NO: 280, SEQ ID NO: 281, SEQ ID NO: 282, or SEQ ID NO: 283.

[0354] In some examples of any of the ABPCs described herein, the first antigen-binding domain includes a light chain variable domain comprising SEQ ID NO: 196, and a heavy chain variable domain comprising SEQ ID NO: 217, SEQ ID NO: 218, SEQ ID NO: 219, SEQ ID NO: 220, SEQ ID NO: 221, SEQ ID NO: 222, SEQ ID NO: 223, SEQ ID NO: 224, SEQ ID NO: 225, SEQ ID NO: 226, SEQ ID NO: 227, SEQ ID NO: 228, SEQ ID NO: 229, SEQ ID NO: 230, SEQ ID NO: 231, SEQ ID NO: 232, SEQ ID NO: 233, SEQ ID NO: 234, SEQ ID NO: 235, SEQ ID NO: 236, SEQ ID NO: 237, SEQ ID NO: 238, SEQ ID NO: 239, SEQ ID NO: 240, SEQ ID NO: 241, SEQ ID NO: 242, SEQ ID NO: 243, SEQ ID NO: 244, SEQ ID NO: 245, SEQ ID NO: 246, SEQ ID NO: 247, SEQ ID NO: 248, SEQ ID NO: 249, SEQ ID NO: 250, SEQ ID NO: 251, SEQ ID NO: 252, SEQ ID NO: 253, SEQ ID NO: 254, SEQ ID NO: 255, SEQ ID NO: 256, SEQ ID NO: 257, SEQ ID NO: 258, SEQ ID NO: 259, SEQ ID NO: 260, SEQ ID NO: 261, SEQ ID NO: 262, SEQ ID NO: 263, SEQ ID NO: 264, SEQ ID NO: 265, SEQ ID NO: 266, SEQ ID NO: 267, SEQ ID NO: 268, SEQ ID NO: 269, SEQ ID NO: 270, SEQ ID NO: 271, SEQ ID NO: 272, SEQ ID NO: 273, SEQ ID NO: 274, SEQ ID NO: 275, SEQ ID NO: 276, SEQ ID NO: 277, SEQ ID NO: 278, SEQ ID NO: 279, SEQ ID NO: 280, SEQ ID NO: 281, SEQ ID NO: 282, or SEQ ID NO: 283.

[0355] In some examples of any of the ABPCs described herein, the first antigen-binding domain includes a light chain variable domain comprising SEQ ID NO: 197, and a heavy chain variable domain comprising SEQ ID NO: 217, SEQ ID NO: 218, SEQ ID NO: 219, SEQ ID NO: 220, SEQ ID NO: 221, SEQ ID NO: 222, SEQ ID NO: 223, SEQ ID NO: 224, SEQ ID NO: 225, SEQ ID NO: 226, SEQ ID NO: 227, SEQ ID NO: 228, SEQ ID NO: 229, SEQ ID NO: 230, SEQ ID NO: 231, SEQ ID NO: 232, SEQ ID NO: 233, SEQ ID NO: 234, SEQ ID NO: 235, SEQ ID NO: 236, SEQ ID NO: 237, SEQ ID NO: 238, SEQ ID NO: 239, SEQ ID NO: 240, SEQ ID NO: 241, SEQ ID NO: 242, SEQ ID NO: 243, SEQ ID NO: 244, SEQ ID NO: 245, SEQ ID NO: 246, SEQ ID NO: 247, SEQ ID NO: 248, SEQ ID NO: 249, SEQ ID NO: 250, SEQ ID NO: 251, SEQ ID NO: 252, SEQ ID NO: 253, SEQ ID NO: 254, SEQ ID NO: 255, SEQ ID NO: 256, SEQ ID NO: 257, SEQ ID NO: 258, SEQ ID NO: 259, SEQ ID NO: 260, SEQ ID NO: 261, SEQ ID NO: 262, SEQ ID NO: 263, SEQ ID NO: 264, SEQ ID NO: 265, SEQ ID NO: 266, SEQ ID NO: 267, SEQ ID NO: 268, SEQ ID NO: 269, SEQ ID NO: 270, SEQ ID NO: 271, SEQ ID NO: 272, SEQ ID NO: 273, SEQ ID NO: 274, SEQ ID NO: 275, SEQ ID NO: 276, SEQ ID NO: 277, SEQ ID NO: 278, SEQ ID NO: 279, SEQ ID NO: 280, SEQ ID NO: 281, SEQ ID NO: 282, or SEQ ID NO: 283.

[0356] In some examples of any of the ABPCs described herein, the first antigen-binding domain includes a light chain variable domain comprising SEQ ID NO: 198, and a heavy chain variable domain comprising SEQ ID NO: 217, SEQ ID NO: 218, SEQ ID NO: 219, SEQ ID NO: 220, SEQ ID NO: 221, SEQ ID NO: 222, SEQ ID NO: 223, SEQ ID NO: 224, SEQ ID NO: 225, SEQ ID NO: 226, SEQ ID NO: 227, SEQ ID NO: 228, SEQ ID NO: 229, SEQ ID NO: 230, SEQ ID NO: 231, SEQ ID NO: 232, SEQ ID NO: 233, SEQ ID NO: 234, SEQ ID NO: 235, SEQ ID NO: 236, SEQ ID NO: 237, SEQ ID NO: 238, SEQ ID NO: 239, SEQ ID NO: 240, SEQ ID NO: 241, SEQ ID NO: 242, SEQ ID NO: 243, SEQ ID NO: 244, SEQ ID NO: 245, SEQ ID NO: 246, SEQ ID NO: 247, SEQ ID NO: 248, SEQ ID NO: 249, SEQ ID NO: 250, SEQ ID NO: 251, SEQ ID NO: 252, SEQ ID NO: 253, SEQ ID NO: 254, SEQ ID NO: 255, SEQ ID NO: 256, SEQ ID NO: 257, SEQ ID NO: 258, SEQ ID NO: 259, SEQ ID NO: 260, SEQ ID NO: 261, SEQ ID NO: 262, SEQ ID NO: 263, SEQ ID NO: 264, SEQ ID NO: 265, SEQ ID NO: 266, SEQ ID NO: 267, SEQ ID NO: 268, SEQ ID NO: 269, SEQ ID NO: 270, SEQ ID NO: 271, SEQ ID NO: 272, SEQ ID NO: 273, SEQ ID NO: 274, SEQ ID NO: 275, SEQ ID NO: 276, SEQ ID NO: 277, SEQ ID NO: 278, SEQ ID NO: 279, SEQ ID NO: 280, SEQ ID NO: 281, SEQ ID NO: 282, or SEQ ID NO: 283.

[0357] In some examples of any of the ABPCs described herein, the first antigen-binding domain includes a light chain variable domain comprising SEQ ID NO: 199, and a heavy chain variable domain comprising SEQ ID NO: 217, SEQ ID NO: 218, SEQ ID NO: 219, SEQ ID NO: 220, SEQ ID NO: 221, SEQ ID NO: 222, SEQ ID NO: 223, SEQ ID NO: 224, SEQ ID NO: 225, SEQ ID NO: 226, SEQ ID NO: 227, SEQ ID NO: 228, SEQ ID NO: 229, SEQ ID NO: 230, SEQ ID NO: 231, SEQ ID NO: 232, SEQ ID NO: 233, SEQ ID NO: 234, SEQ ID NO: 235, SEQ ID NO: 236, SEQ ID NO: 237, SEQ ID NO: 238, SEQ ID NO: 239, SEQ ID NO: 240, SEQ ID NO: 241, SEQ ID NO: 242, SEQ ID NO: 243, SEQ ID NO: 244, SEQ ID NO: 245, SEQ ID NO: 246, SEQ ID NO: 247, SEQ ID NO: 248, SEQ ID NO: 249, SEQ ID NO: 250, SEQ ID NO: 251, SEQ ID NO: 252, SEQ ID NO: 253, SEQ ID NO: 254, SEQ ID NO: 255, SEQ ID NO: 256, SEQ ID NO: 257, SEQ ID NO: 258, SEQ ID NO: 259, SEQ ID NO: 260, SEQ ID NO: 261, SEQ ID NO: 262, SEQ ID NO: 263, SEQ ID NO: 264, SEQ ID NO: 265, SEQ ID NO: 266, SEQ ID NO: 267, SEQ ID NO: 268, SEQ ID NO: 269, SEQ ID NO: 270, SEQ ID NO: 271, SEQ ID NO: 272, SEQ ID NO: 273, SEQ ID NO: 274, SEQ ID NO: 275, SEQ ID NO: 276, SEQ ID NO: 277, SEQ ID NO: 278, SEQ ID NO: 279, SEQ ID NO: 280, SEQ ID NO: 281, SEQ ID NO: 282, or SEQ ID NO: 283.

[0358] In some examples of any of the ABPCs described herein, the first antigen-binding domain includes a light chain variable domain comprising SEQ ID NO: 200, and a heavy chain variable domain comprising SEQ ID NO: 217, SEQ ID NO: 218, SEQ ID NO: 219, SEQ ID NO: 220, SEQ ID NO: 221, SEQ ID NO: 222, SEQ ID NO: 223, SEQ ID NO: 224, SEQ ID NO: 225, SEQ ID NO: 226, SEQ ID NO: 227, SEQ ID NO: 228, SEQ ID NO: 229, SEQ ID NO: 230, SEQ ID NO: 231, SEQ ID NO: 232, SEQ ID NO: 233, SEQ ID NO: 234, SEQ ID NO: 235, SEQ ID NO: 236, SEQ ID NO: 237, SEQ ID NO: 238, SEQ ID NO: 239, SEQ ID NO: 240, SEQ ID NO: 241, SEQ ID NO: 242, SEQ ID NO: 243, SEQ ID NO: 244, SEQ ID NO: 245, SEQ ID NO: 246, SEQ ID NO: 247, SEQ ID NO: 248, SEQ ID NO: 249, SEQ ID NO: 250, SEQ ID NO: 251, SEQ ID NO: 252, SEQ ID NO: 253, SEQ ID NO: 254, SEQ ID NO: 255, SEQ ID NO: 256, SEQ ID NO: 257, SEQ ID NO: 258, SEQ ID NO: 259, SEQ ID NO: 260, SEQ ID NO: 261, SEQ ID NO: 262, SEQ ID NO: 263, SEQ ID NO: 264, SEQ ID NO: 265, SEQ ID NO: 266, SEQ ID NO: 267, SEQ ID NO: 268, SEQ ID NO: 269, SEQ ID NO: 270, SEQ ID NO: 271, SEQ ID NO: 272, SEQ ID NO: 273, SEQ ID NO: 274, SEQ ID NO: 275, SEQ ID NO: 276, SEQ ID NO: 277, SEQ ID NO: 278, SEQ ID NO: 279, SEQ ID NO: 280, SEQ ID NO: 281, SEQ ID NO: 282, or SEQ ID NO: 283.

[0359] In some examples of any of the ABPCs described herein, the first antigen-binding domain includes a light chain variable domain comprising SEQ ID NO: 201, and a heavy chain variable domain comprising SEQ ID NO: 217, SEQ ID NO: 218, SEQ ID NO: 219, SEQ ID NO: 220, SEQ ID NO: 221, SEQ ID NO: 222, SEQ ID NO: 223, SEQ ID NO: 224, SEQ ID NO: 225, SEQ ID NO: 226, SEQ ID NO: 227, SEQ ID NO: 228, SEQ ID NO: 229, SEQ ID NO: 230, SEQ ID NO: 231, SEQ ID NO: 232, SEQ ID NO: 233, SEQ ID NO: 234, SEQ ID NO: 235, SEQ ID NO: 236, SEQ ID NO: 237, SEQ ID NO: 238, SEQ ID NO: 239, SEQ ID NO: 240, SEQ ID NO: 241, SEQ ID NO: 242, SEQ ID NO: 243, SEQ ID NO: 244, SEQ ID NO: 245, SEQ ID NO: 246, SEQ ID NO: 247, SEQ ID NO: 248, SEQ ID NO: 249, SEQ ID NO: 250, SEQ ID NO: 251, SEQ ID NO: 252, SEQ ID NO: 253, SEQ ID NO: 254, SEQ ID NO: 255, SEQ ID NO: 256, SEQ ID NO: 257, SEQ ID NO: 258, SEQ ID NO: 259, SEQ ID NO: 260, SEQ ID NO: 261, SEQ ID NO: 262, SEQ ID NO: 263, SEQ ID NO: 264, SEQ ID NO: 265, SEQ ID NO: 266, SEQ ID NO: 267, SEQ ID NO: 268, SEQ ID NO: 269, SEQ ID NO: 270, SEQ ID NO: 271, SEQ ID NO: 272, SEQ ID NO: 273, SEQ ID NO: 274, SEQ ID NO: 275, SEQ ID NO: 276, SEQ ID NO: 277, SEQ ID NO: 278, SEQ ID NO: 279, SEQ ID NO: 280, SEQ ID NO: 281, SEQ ID NO: 282, or SEQ ID NO: 283.

[0360] In some examples of any of the ABPCs described herein, the first antigen-binding domain includes a light chain variable domain comprising SEQ ID NO: 202, and a heavy chain variable domain comprising SEQ ID NO: 217, SEQ ID NO: 218, SEQ ID NO: 219, SEQ ID NO: 220, SEQ ID NO: 221, SEQ ID NO: 222, SEQ ID NO: 223, SEQ ID NO: 224, SEQ ID NO: 225, SEQ ID NO: 226, SEQ ID NO: 227, SEQ ID NO: 228, SEQ ID NO: 229, SEQ ID NO: 230, SEQ ID NO: 231, SEQ ID NO: 232, SEQ ID NO: 233, SEQ ID NO: 234, SEQ ID NO: 235, SEQ ID NO: 236, SEQ ID NO: 237, SEQ ID NO: 238, SEQ ID NO: 239, SEQ ID NO: 240, SEQ ID NO: 241, SEQ ID NO: 242, SEQ ID NO: 243, SEQ ID NO: 244, SEQ ID NO: 245, SEQ ID NO: 246, SEQ ID NO: 247, SEQ ID NO: 248, SEQ ID NO: 249, SEQ ID NO: 250, SEQ ID NO: 251, SEQ ID NO: 252, SEQ ID NO: 253, SEQ ID NO: 254, SEQ ID NO: 255, SEQ ID NO: 256, SEQ ID NO: 257, SEQ ID NO: 258, SEQ ID NO: 259, SEQ ID NO: 260, SEQ ID NO: 261, SEQ ID NO: 262, SEQ ID NO: 263, SEQ ID NO: 264, SEQ ID NO: 265, SEQ ID NO: 266, SEQ ID NO: 267, SEQ ID NO: 268, SEQ ID NO: 269, SEQ ID NO: 270, SEQ ID NO: 271, SEQ ID NO: 272, SEQ ID NO: 273, SEQ ID NO: 274, SEQ ID NO: 275, SEQ ID NO: 276, SEQ ID NO: 277, SEQ ID NO: 278, SEQ ID NO: 279, SEQ ID NO: 280, SEQ ID NO: 281, SEQ ID NO: 282, or SEQ ID NO: 283.

[0361] In some examples of any of the ABPCs described herein, the first antigen-binding domain includes a light chain variable domain comprising SEQ ID NO: 203, and a heavy chain variable domain comprising SEQ ID NO: 217, SEQ ID NO: 218, SEQ ID NO: 219, SEQ ID NO: 220, SEQ ID NO: 221, SEQ ID NO: 222, SEQ ID NO: 223, SEQ ID NO: 224, SEQ ID NO: 225, SEQ ID NO: 226, SEQ ID NO: 227, SEQ ID NO: 228, SEQ ID NO: 229, SEQ ID NO: 230, SEQ ID NO: 231, SEQ ID NO: 232, SEQ ID NO: 233, SEQ ID NO: 234, SEQ ID NO: 235, SEQ ID NO: 236, SEQ ID NO: 237, SEQ ID NO: 238, SEQ ID NO: 239, SEQ ID NO: 240, SEQ ID NO: 241, SEQ ID NO: 242, SEQ ID NO: 243, SEQ ID NO: 244, SEQ ID NO: 245, SEQ ID NO: 246, SEQ ID NO: 247, SEQ ID NO: 248, SEQ ID NO: 249, SEQ ID NO: 250, SEQ ID NO: 251, SEQ ID NO: 252, SEQ ID NO: 253, SEQ ID NO: 254, SEQ ID NO: 255, SEQ ID NO: 256, SEQ ID NO: 257, SEQ ID NO: 258, SEQ ID NO: 259, SEQ ID NO: 260, SEQ ID NO: 261, SEQ ID NO: 262, SEQ ID NO: 263, SEQ ID NO: 264, SEQ ID NO: 265, SEQ ID NO: 266, SEQ ID NO: 267, SEQ ID NO: 268, SEQ ID NO: 269, SEQ ID NO: 270, SEQ ID NO: 271, SEQ ID NO: 272, SEQ ID NO: 273, SEQ ID NO: 274, SEQ ID NO: 275, SEQ ID NO: 276, SEQ ID NO: 277, SEQ ID NO: 278, SEQ ID NO: 279, SEQ ID NO: 280, SEQ ID NO: 281, SEQ ID NO: 282, or SEQ ID NO: 283.

[0362] In some examples of any of the ABPCs described herein, the first antigen-binding domain includes a light chain variable domain comprising SEQ ID NO: 204, and a heavy chain variable domain comprising SEQ ID NO: 217, SEQ ID NO: 218, SEQ ID NO: 219, SEQ ID NO: 220, SEQ ID NO: 221, SEQ ID NO: 222, SEQ ID NO: 223, SEQ ID NO: 224, SEQ ID NO: 225, SEQ ID NO: 226, SEQ ID NO: 227, SEQ ID NO: 228, SEQ ID NO: 229, SEQ ID NO: 230, SEQ ID NO: 231, SEQ ID NO: 232, SEQ ID NO: 233, SEQ ID NO: 234, SEQ ID NO: 235, SEQ ID NO: 236, SEQ ID NO: 237, SEQ ID NO: 238, SEQ ID NO: 239, SEQ ID NO: 240, SEQ ID NO: 241, SEQ ID NO: 242, SEQ ID NO: 243, SEQ ID NO: 244, SEQ ID NO: 245, SEQ ID NO: 246, SEQ ID NO: 247, SEQ ID NO: 248, SEQ ID NO: 249, SEQ ID NO: 250, SEQ ID NO: 251, SEQ ID NO: 252, SEQ ID NO: 253, SEQ ID NO: 254, SEQ ID NO: 255, SEQ ID NO: 256, SEQ ID NO: 257, SEQ ID NO: 258, SEQ ID NO: 259, SEQ ID NO: 260, SEQ ID NO: 261, SEQ ID NO: 262, SEQ ID NO: 263, SEQ ID NO: 264, SEQ ID NO: 265, SEQ ID NO: 266, SEQ ID NO: 267, SEQ ID NO: 268, SEQ ID NO: 269, SEQ ID NO: 270, SEQ ID NO: 271, SEQ ID NO: 272, SEQ ID NO: 273, SEQ ID NO: 274, SEQ ID NO: 275, SEQ ID NO: 276, SEQ ID NO: 277, SEQ ID NO: 278, SEQ ID NO: 279, SEQ ID NO: 280, SEQ ID NO: 281, SEQ ID NO: 282, or SEQ ID NO: 283.

[0363] In some examples of any of the ABPCs described herein, the first antigen-binding domain includes a light chain variable domain comprising SEQ ID NO: 205, and a heavy chain variable domain comprising SEQ ID NO: 217, SEQ ID NO: 218, SEQ ID NO: 219, SEQ ID NO: 220, SEQ ID NO: 221, SEQ ID NO: 222, SEQ ID NO: 223, SEQ ID NO: 224, SEQ ID NO: 225, SEQ ID NO: 226, SEQ ID NO: 227, SEQ ID NO: 228, SEQ ID NO: 229, SEQ ID NO: 230, SEQ ID NO: 231, SEQ ID NO: 232, SEQ ID NO: 233, SEQ ID NO: 234, SEQ ID NO: 235, SEQ ID NO: 236, SEQ ID NO: 237, SEQ ID NO: 238, SEQ ID NO: 239, SEQ ID NO: 240, SEQ ID NO: 241, SEQ ID NO: 242, SEQ ID NO: 243, SEQ ID NO: 244, SEQ ID NO: 245, SEQ ID NO: 246, SEQ ID NO: 247, SEQ ID NO: 248, SEQ ID NO: 249, SEQ ID NO: 250, SEQ ID NO: 251, SEQ ID NO: 252, SEQ ID NO: 253, SEQ ID NO: 254, SEQ ID NO: 255, SEQ ID NO: 256, SEQ ID NO: 257, SEQ ID NO: 258, SEQ ID NO: 259, SEQ ID NO: 260, SEQ ID NO: 261, SEQ ID NO: 262, SEQ ID NO: 263, SEQ ID NO: 264, SEQ ID NO: 265, SEQ ID NO: 266, SEQ ID NO: 267, SEQ ID NO: 268, SEQ ID NO: 269, SEQ ID NO: 270, SEQ ID NO: 271, SEQ ID NO: 272, SEQ ID NO: 273, SEQ ID NO: 274, SEQ ID NO: 275, SEQ ID NO: 276, SEQ ID NO: 277, SEQ ID NO: 278, SEQ ID NO: 279, SEQ ID NO: 280, SEQ ID NO: 281, SEQ ID NO: 282, or SEQ ID NO: 283.

[0364] In some examples of any of the ABPCs described herein, the first antigen-binding domain includes a light chain variable domain comprising SEQ ID NO: 206, and a heavy chain variable domain comprising SEQ ID NO: 217, SEQ ID NO: 218, SEQ ID NO: 219, SEQ ID NO: 220, SEQ ID NO: 221, SEQ ID NO: 222, SEQ ID NO: 223, SEQ ID NO: 224, SEQ ID NO: 225, SEQ ID NO: 226, SEQ ID NO: 227, SEQ ID NO: 228, SEQ ID NO: 229, SEQ ID NO: 230, SEQ ID NO: 231, SEQ ID NO: 232, SEQ ID NO: 233, SEQ ID NO: 234, SEQ ID NO: 235, SEQ ID NO: 236, SEQ ID NO: 237, SEQ ID NO: 238, SEQ ID NO: 239, SEQ ID NO: 240, SEQ ID NO: 241, SEQ ID NO: 242, SEQ ID NO: 243, SEQ ID NO: 244, SEQ ID NO: 245, SEQ ID NO: 246, SEQ ID NO: 247, SEQ ID NO: 248, SEQ ID NO: 249, SEQ ID NO: 250, SEQ ID NO: 251, SEQ ID NO: 252, SEQ ID NO: 253, SEQ ID NO: 254, SEQ ID NO: 255, SEQ ID NO: 256, SEQ ID NO: 257, SEQ ID NO: 258, SEQ ID NO: 259, SEQ ID NO: 260, SEQ ID NO: 261, SEQ ID NO: 262, SEQ ID NO: 263, SEQ ID NO: 264, SEQ ID NO: 265, SEQ ID NO: 266, SEQ ID NO: 267, SEQ ID NO: 268, SEQ ID NO: 269, SEQ ID NO: 270, SEQ ID NO: 271, SEQ ID NO: 272, SEQ ID NO: 273, SEQ ID NO: 274, SEQ ID NO: 275, SEQ ID NO: 276, SEQ ID NO: 277, SEQ ID NO: 278, SEQ ID NO: 279, SEQ ID NO: 280, SEQ ID NO: 281, SEQ ID NO: 282, or SEQ ID NO: 283.

[0365] In some examples of any of the ABPCs described herein, the first antigen-binding domain includes a light chain variable domain comprising SEQ ID NO: 207, and a heavy chain variable domain comprising SEQ ID NO: 217, SEQ ID NO: 218, SEQ ID NO: 219, SEQ ID NO: 220, SEQ ID NO: 221, SEQ ID NO: 222, SEQ ID NO: 223, SEQ ID NO: 224, SEQ ID NO: 225, SEQ ID NO: 226, SEQ ID NO: 227, SEQ ID NO: 228, SEQ ID NO: 229, SEQ ID NO: 230, SEQ ID NO: 231, SEQ ID NO: 232, SEQ ID NO: 233, SEQ ID NO: 234, SEQ ID NO: 235, SEQ ID NO: 236, SEQ ID NO: 237, SEQ ID NO: 238, SEQ ID NO: 239, SEQ ID NO: 240, SEQ ID NO: 241, SEQ ID NO: 242, SEQ ID NO: 243, SEQ ID NO: 244, SEQ ID NO: 245, SEQ ID NO: 246, SEQ ID NO: 247, SEQ ID NO: 248, SEQ ID NO: 249, SEQ ID NO: 250, SEQ ID NO: 251, SEQ ID NO: 252, SEQ ID NO: 253, SEQ ID NO: 254, SEQ ID NO: 255, SEQ ID NO: 256, SEQ ID NO: 257, SEQ ID NO: 258, SEQ ID NO: 259, SEQ ID NO: 260, SEQ ID NO: 261, SEQ ID NO: 262, SEQ ID NO: 263, SEQ ID NO: 264, SEQ ID NO: 265, SEQ ID NO: 266, SEQ ID NO: 267, SEQ ID NO: 268, SEQ ID NO: 269, SEQ ID NO: 270, SEQ ID NO: 271, SEQ ID NO: 272, SEQ ID NO: 273, SEQ ID NO: 274, SEQ ID NO: 275, SEQ ID NO: 276, SEQ ID NO: 277, SEQ ID NO: 278, SEQ ID NO: 279, SEQ ID NO: 280, SEQ ID NO: 281, SEQ ID NO: 282, or SEQ ID NO: 283.

[0366] In some examples of any of the ABPCs described herein, the first antigen-binding domain includes a light chain variable domain comprising SEQ ID NO: 208, and a heavy chain variable domain comprising SEQ ID NO: 217, SEQ ID NO: 218, SEQ ID NO: 219, SEQ ID NO: 220, SEQ ID NO: 221, SEQ ID NO: 222, SEQ ID NO: 223, SEQ ID NO: 224, SEQ ID NO: 225, SEQ ID NO: 226, SEQ ID NO: 227, SEQ ID NO: 228, SEQ ID NO: 229, SEQ ID NO: 230, SEQ ID NO: 231, SEQ ID NO: 232, SEQ ID NO: 233, SEQ ID NO: 234, SEQ ID NO: 235, SEQ ID NO: 236, SEQ ID NO: 237, SEQ ID NO: 238, SEQ ID NO: 239, SEQ ID NO: 240, SEQ ID NO: 241, SEQ ID NO: 242, SEQ ID NO: 243, SEQ ID NO: 244, SEQ ID NO: 245, SEQ ID NO: 246, SEQ ID NO: 247, SEQ ID NO: 248, SEQ ID NO: 249, SEQ ID NO: 250, SEQ ID NO: 251, SEQ ID NO: 252, SEQ ID NO: 253, SEQ ID NO: 254, SEQ ID NO: 255, SEQ ID NO: 256, SEQ ID NO: 257, SEQ ID NO: 258, SEQ ID NO: 259, SEQ ID NO: 260, SEQ ID NO: 261, SEQ ID NO: 262, SEQ ID NO: 263, SEQ ID NO: 264, SEQ ID NO: 265, SEQ ID NO: 266, SEQ ID NO: 267, SEQ ID NO: 268, SEQ ID NO: 269, SEQ ID NO: 270, SEQ ID NO: 271, SEQ ID NO: 272, SEQ ID NO: 273, SEQ ID NO: 274, SEQ ID NO: 275, SEQ ID NO: 276, SEQ ID NO: 277, SEQ ID NO: 278, SEQ ID NO: 279, SEQ ID NO: 280, SEQ ID NO: 281, SEQ ID NO: 282, or SEQ ID NO: 283.

[0367] In some examples of any of the ABPCs described herein, the first antigen-binding domain includes a light chain variable domain comprising SEQ ID NO: 209, and a heavy chain variable domain comprising SEQ ID NO: 217, SEQ ID NO: 218, SEQ ID NO: 219, SEQ ID NO: 220, SEQ ID NO: 221, SEQ ID NO: 222, SEQ ID NO: 223, SEQ ID NO: 224, SEQ ID NO: 225, SEQ ID NO: 226, SEQ ID NO: 227, SEQ ID NO: 228, SEQ ID NO: 229, SEQ ID NO: 230, SEQ ID NO: 231, SEQ ID NO: 232, SEQ ID NO: 233, SEQ ID NO: 234, SEQ ID NO: 235, SEQ ID NO: 236, SEQ ID NO: 237, SEQ ID NO: 238, SEQ ID NO: 239, SEQ ID NO: 240, SEQ ID NO: 241, SEQ ID NO: 242, SEQ ID NO: 243, SEQ ID NO: 244, SEQ ID NO: 245, SEQ ID NO: 246, SEQ ID NO: 247, SEQ ID NO: 248, SEQ ID NO: 249, SEQ ID NO: 250, SEQ ID NO: 251, SEQ ID NO: 252, SEQ ID NO: 253, SEQ ID NO: 254, SEQ ID NO: 255, SEQ ID NO: 256, SEQ ID NO: 257, SEQ ID NO: 258, SEQ ID NO: 259, SEQ ID NO: 260, SEQ ID NO: 261, SEQ ID NO: 262, SEQ ID NO: 263, SEQ ID NO: 264, SEQ ID NO: 265, SEQ ID NO: 266, SEQ ID NO: 267, SEQ ID NO: 268, SEQ ID NO: 269, SEQ ID NO: 270, SEQ ID NO: 271, SEQ ID NO: 272, SEQ ID NO: 273, SEQ ID NO: 274, SEQ ID NO: 275, SEQ ID NO: 276, SEQ ID NO: 277, SEQ ID NO: 278, SEQ ID NO: 279, SEQ ID NO: 280, SEQ ID NO: 281, SEQ ID NO: 282, or SEQ ID NO: 283.

[0368] In some examples of any of the ABPCs described herein, the first antigen-binding domain includes a light chain variable domain comprising SEQ ID NO: 210, and a heavy chain variable domain comprising SEQ ID NO: 217, SEQ ID NO: 218, SEQ ID NO: 219, SEQ ID NO: 220, SEQ ID NO: 221, SEQ ID NO: 222, SEQ ID NO: 223, SEQ ID NO: 224, SEQ ID NO: 225, SEQ ID NO: 226, SEQ ID NO: 227, SEQ ID NO: 228, SEQ ID NO: 229, SEQ ID NO: 230, SEQ ID NO: 231, SEQ ID NO: 232, SEQ ID NO: 233, SEQ ID NO: 234, SEQ ID NO: 235, SEQ ID NO: 236, SEQ ID NO: 237, SEQ ID NO: 238, SEQ ID NO: 239, SEQ ID NO: 240, SEQ ID NO: 241, SEQ ID NO: 242, SEQ ID NO: 243, SEQ ID NO: 244, SEQ ID NO: 245, SEQ ID NO: 246, SEQ ID NO: 247, SEQ ID NO: 248, SEQ ID NO: 249, SEQ ID NO: 250, SEQ ID NO: 251, SEQ ID NO: 252, SEQ ID NO: 253, SEQ ID NO: 254, SEQ ID NO: 255, SEQ ID NO: 256, SEQ ID NO: 257, SEQ ID NO: 258, SEQ ID NO: 259, SEQ ID NO: 260, SEQ ID NO: 261, SEQ ID NO: 262, SEQ ID NO: 263, SEQ ID NO: 264, SEQ ID NO: 265, SEQ ID NO: 266, SEQ ID NO: 267, SEQ ID NO: 268, SEQ ID NO: 269, SEQ ID NO: 270, SEQ ID NO: 271, SEQ ID NO: 272, SEQ ID NO: 273, SEQ ID NO: 274, SEQ ID NO: 275, SEQ ID NO: 276, SEQ ID NO: 277, SEQ ID NO: 278, SEQ ID NO: 279, SEQ ID NO: 280, SEQ ID NO: 281, SEQ ID NO: 282, or SEQ ID NO: 283.

[0369] In some examples of any of the ABPCs described herein, the first antigen-binding domain includes a light chain variable domain comprising SEQ ID NO: 211, and a heavy chain variable domain comprising SEQ ID NO: 217, SEQ ID NO: 218, SEQ ID NO: 219, SEQ ID NO: 220, SEQ ID NO: 221, SEQ ID NO: 222, SEQ ID NO: 223, SEQ ID NO: 224, SEQ ID NO: 225, SEQ ID NO: 226, SEQ ID NO: 227, SEQ ID NO: 228, SEQ ID NO: 229, SEQ ID NO: 230, SEQ ID NO: 231, SEQ ID NO: 232, SEQ ID NO: 233, SEQ ID NO: 234, SEQ ID NO: 235, SEQ ID NO: 236, SEQ ID NO: 237, SEQ ID NO: 238, SEQ ID NO: 239, SEQ ID NO: 240, SEQ ID NO: 241, SEQ ID NO: 242, SEQ ID NO: 243, SEQ ID NO: 244, SEQ ID NO: 245, SEQ ID NO: 246, SEQ ID NO: 247, SEQ ID NO: 248, SEQ ID NO: 249, SEQ ID NO: 250, SEQ ID NO: 251, SEQ ID NO: 252, SEQ ID NO: 253, SEQ ID NO: 254, SEQ ID NO: 255, SEQ ID NO: 256, SEQ ID NO: 257, SEQ ID NO: 258, SEQ ID NO: 259, SEQ ID NO: 260, SEQ ID NO: 261, SEQ ID NO: 262, SEQ ID NO: 263, SEQ ID NO: 264, SEQ ID NO: 265, SEQ ID NO: 266, SEQ ID NO: 267, SEQ ID NO: 268, SEQ ID NO: 269, SEQ ID NO: 270, SEQ ID NO: 271, SEQ ID NO: 272, SEQ ID NO: 273, SEQ ID NO: 274, SEQ ID NO: 275, SEQ ID NO: 276, SEQ ID NO: 277, SEQ ID NO: 278, SEQ ID NO: 279, SEQ ID NO: 280, SEQ ID NO: 281, SEQ ID NO: 282, or SEQ ID NO: 283.

[0370] In some examples of any of the ABPCs described herein, the first antigen-binding domain includes a light chain variable domain comprising SEQ ID NO: 212, and a heavy chain variable domain comprising SEQ ID NO: 217, SEQ ID NO: 218, SEQ ID NO: 219, SEQ ID NO: 220, SEQ ID NO: 221, SEQ ID NO: 222, SEQ ID NO: 223, SEQ ID NO: 224, SEQ ID NO: 225, SEQ ID NO: 226, SEQ ID NO: 227, SEQ ID NO: 228, SEQ ID NO: 229, SEQ ID NO: 230, SEQ ID NO: 231, SEQ ID NO: 232, SEQ ID NO: 233, SEQ ID NO: 234, SEQ ID NO: 235, SEQ ID NO: 236, SEQ ID NO: 237, SEQ ID NO: 238, SEQ ID NO: 239, SEQ ID NO: 240, SEQ ID NO: 241, SEQ ID NO: 242, SEQ ID NO: 243, SEQ ID NO: 244, SEQ ID NO: 245, SEQ ID NO: 246, SEQ ID NO: 247, SEQ ID NO: 248, SEQ ID NO: 249, SEQ ID NO: 250, SEQ ID NO: 251, SEQ ID NO: 252, SEQ ID NO: 253, SEQ ID NO: 254, SEQ ID NO: 255, SEQ ID NO: 256, SEQ ID NO: 257, SEQ ID NO: 258, SEQ ID NO: 259, SEQ ID NO: 260, SEQ ID NO: 261, SEQ ID NO: 262, SEQ ID NO: 263, SEQ ID NO: 264, SEQ ID NO: 265, SEQ ID NO: 266, SEQ ID NO: 267, SEQ ID NO: 268, SEQ ID NO: 269, SEQ ID NO: 270, SEQ ID NO: 271, SEQ ID NO: 272, SEQ ID NO: 273, SEQ ID NO: 274, SEQ ID NO: 275, SEQ ID NO: 276, SEQ ID NO: 277, SEQ ID NO: 278, SEQ ID NO: 279, SEQ ID NO: 280, SEQ ID NO: 281, SEQ ID NO: 282, or SEQ ID NO: 283.

[0371] In some examples of any of the ABPCs described herein, the first antigen-binding domain includes a light chain variable domain comprising SEQ ID NO: 213, and a heavy chain variable domain comprising SEQ ID NO: 217, SEQ ID NO: 218, SEQ ID NO: 219, SEQ ID NO: 220, SEQ ID NO: 221, SEQ ID NO: 222, SEQ ID NO: 223, SEQ ID NO: 224, SEQ ID NO: 225, SEQ ID NO: 226, SEQ ID NO: 227, SEQ ID NO: 228, SEQ ID NO: 229, SEQ ID NO: 230, SEQ ID NO: 231, SEQ ID NO: 232, SEQ ID NO: 233, SEQ ID NO: 234, SEQ ID NO: 235, SEQ ID NO: 236, SEQ ID NO: 237, SEQ ID NO: 238, SEQ ID NO: 239, SEQ ID NO: 240, SEQ ID NO: 241, SEQ ID NO: 242, SEQ ID NO: 243, SEQ ID NO: 244, SEQ ID NO: 245, SEQ ID NO: 246, SEQ ID NO: 247, SEQ ID NO: 248, SEQ ID NO: 249, SEQ ID NO: 250, SEQ ID NO: 251, SEQ ID NO: 252, SEQ ID NO: 253, SEQ ID NO: 254, SEQ ID NO: 255, SEQ ID NO: 256, SEQ ID NO: 257, SEQ ID NO: 258, SEQ ID NO: 259, SEQ ID NO: 260, SEQ ID NO: 261, SEQ ID NO: 262, SEQ ID NO: 263, SEQ ID NO: 264, SEQ ID NO: 265, SEQ ID NO: 266, SEQ ID NO: 267, SEQ ID NO: 268, SEQ ID NO: 269, SEQ ID NO: 270, SEQ ID NO: 271, SEQ ID NO: 272, SEQ ID NO: 273, SEQ ID NO: 274, SEQ ID NO: 275, SEQ ID NO: 276, SEQ ID NO: 277, SEQ ID NO: 278, SEQ ID NO: 279, SEQ ID NO: 280, SEQ ID NO: 281, SEQ ID NO: 282, or SEQ ID NO: 283.

[0372] In some examples of any of the ABPCs described herein, the first antigen-binding domain includes a light chain variable domain comprising SEQ ID NO: 214, and a heavy chain variable domain comprising SEQ ID NO: 217, SEQ ID NO: 218, SEQ ID NO: 219, SEQ ID NO: 220, SEQ ID NO: 221, SEQ ID NO: 222, SEQ ID NO: 223, SEQ ID NO: 224, SEQ ID NO: 225, SEQ ID NO: 226, SEQ ID NO: 227, SEQ ID NO: 228, SEQ ID NO: 229, SEQ ID NO: 230, SEQ ID NO: 231, SEQ ID NO: 232, SEQ ID NO: 233, SEQ ID NO: 234, SEQ ID NO: 235, SEQ ID NO: 236, SEQ ID NO: 237, SEQ ID NO: 238, SEQ ID NO: 239, SEQ ID NO: 240, SEQ ID NO: 241, SEQ ID NO: 242, SEQ ID NO: 243, SEQ ID NO: 244, SEQ ID NO: 245, SEQ ID NO: 246, SEQ ID NO: 247, SEQ ID NO: 248, SEQ ID NO: 249, SEQ ID NO: 250, SEQ ID NO: 251, SEQ ID NO: 252, SEQ ID NO: 253, SEQ ID NO: 254, SEQ ID NO: 255, SEQ ID NO: 256, SEQ ID NO: 257, SEQ ID NO: 258, SEQ ID NO: 259, SEQ ID NO: 260, SEQ ID NO: 261, SEQ ID NO: 262, SEQ ID NO: 263, SEQ ID NO: 264, SEQ ID NO: 265, SEQ ID NO: 266, SEQ ID NO: 267, SEQ ID NO: 268, SEQ ID NO: 269, SEQ ID NO: 270, SEQ ID NO: 271, SEQ ID NO: 272, SEQ ID NO: 273, SEQ ID NO: 274, SEQ ID NO: 275, SEQ ID NO: 276, SEQ ID NO: 277, SEQ ID NO: 278, SEQ ID NO: 279, SEQ ID NO: 280, SEQ ID NO: 281, SEQ ID NO: 282, or SEQ ID NO: 283.

[0373] In some examples of any of the ABPCs described herein, the first antigen-binding domain includes a light chain variable domain comprising SEQ ID NO: 215, and a heavy chain variable domain comprising SEQ ID NO: 217, SEQ ID NO: 218, SEQ ID NO: 219, SEQ ID NO: 220, SEQ ID NO: 221, SEQ ID NO: 222, SEQ ID NO: 223, SEQ ID NO: 224, SEQ ID NO: 225, SEQ ID NO: 226, SEQ ID NO: 227, SEQ ID NO: 228, SEQ ID NO: 229, SEQ ID NO: 230, SEQ ID NO: 231, SEQ ID NO: 232, SEQ ID NO: 233, SEQ ID NO: 234, SEQ ID NO: 235, SEQ ID NO: 236, SEQ ID NO: 237, SEQ ID NO: 238, SEQ ID NO: 239, SEQ ID NO: 240, SEQ ID NO: 241, SEQ ID NO: 242, SEQ ID NO: 243, SEQ ID NO: 244, SEQ ID NO: 245, SEQ ID NO: 246, SEQ ID NO: 247, SEQ ID NO: 248, SEQ ID NO: 249, SEQ ID NO: 250, SEQ ID NO: 251, SEQ ID NO: 252, SEQ ID NO: 253, SEQ ID NO: 254, SEQ ID NO: 255, SEQ ID NO: 256, SEQ ID NO: 257, SEQ ID NO: 258, SEQ ID NO: 259, SEQ ID NO: 260, SEQ ID NO: 261, SEQ ID NO: 262, SEQ ID NO: 263, SEQ ID NO: 264, SEQ ID NO: 265, SEQ ID NO: 266, SEQ ID NO: 267, SEQ ID NO: 268, SEQ ID NO: 269, SEQ ID NO: 270, SEQ ID NO: 271, SEQ ID NO: 272, SEQ ID NO: 273, SEQ ID NO: 274, SEQ ID NO: 275, SEQ ID NO: 276, SEQ ID NO: 277, SEQ ID NO: 278, SEQ ID NO: 279, SEQ ID NO: 280, SEQ ID NO: 281, SEQ ID NO: 282, or SEQ ID NO: 283.

[0374] In some examples of any of the ABPCs described herein, the first antigen-binding domain includes a light chain variable domain comprising SEQ ID NO: 216, and a heavy chain variable domain comprising SEQ ID NO: 217, SEQ ID NO: 218, SEQ ID NO: 219, SEQ ID NO: 220, SEQ ID NO: 221, SEQ ID NO: 222, SEQ ID NO: 223, SEQ ID NO: 224, SEQ ID NO: 225, SEQ ID NO: 226, SEQ ID NO: 227, SEQ ID NO: 228, SEQ ID NO: 229, SEQ ID NO: 230, SEQ ID NO: 231, SEQ ID NO: 232, SEQ ID NO: 233, SEQ ID NO: 234, SEQ ID NO: 235, SEQ ID NO: 236, SEQ ID NO: 237, SEQ ID NO: 238, SEQ ID NO: 239, SEQ ID NO: 240, SEQ ID NO: 241, SEQ ID NO: 242, SEQ ID NO: 243, SEQ ID NO: 244, SEQ ID NO: 245, SEQ ID NO: 246, SEQ ID NO: 247, SEQ ID NO: 248, SEQ ID NO: 249, SEQ ID NO: 250, SEQ ID NO: 251, SEQ ID NO: 252, SEQ ID NO: 253, SEQ ID NO: 254, SEQ ID NO: 255, SEQ ID NO: 256, SEQ ID NO: 257, SEQ ID NO: 258, SEQ ID NO: 259, SEQ ID NO: 260, SEQ ID NO: 261, SEQ ID NO: 262, SEQ ID NO: 263, SEQ ID NO: 264, SEQ ID NO: 265, SEQ ID NO: 266, SEQ ID NO: 267, SEQ ID NO: 268, SEQ ID NO: 269, SEQ ID NO: 270, SEQ ID NO: 271, SEQ ID NO: 272, SEQ ID NO: 273, SEQ ID NO: 274, SEQ ID NO: 275, SEQ ID NO: 276, SEQ ID NO: 277, SEQ ID NO: 278, SEQ ID NO: 279, SEQ ID NO: 280, SEQ ID NO: 281, SEQ ID NO: 282, or SEQ ID NO: 283.

[0375] In some examples of any of the ABPCs described herein, the first antigen-binding domain includes a light chain variable domain comprising SEQ ID NO: 284, SEQ ID NO: 285, SEQ ID NO: 286, SEQ ID NO: 287, SEQ ID NO: 288, SEQ ID NO: 289, SEQ ID NO: 290, SEQ ID NO: 291, SEQ ID NO: 292, SEQ ID NO: 293, SEQ ID NO: 294, SEQ ID NO: 295, SEQ ID NO: 296, SEQ ID NO: 297, SEQ ID NO: 298, SEQ ID NO: 299, SEQ ID NO: 300, SEQ ID NO: 301, SEQ ID NO: 302, or SEQ ID NO: 303.

[0376] In some examples of any of the ABPCs described herein, the first antigen-binding domain includes a light chain variable domain comprising SEQ ID NO: 284, and a heavy chain variable domain comprising SEQ ID NO: 146, SEQ ID NO: 154, SEQ ID NO: 155, SEQ ID NO: 156, SEQ ID NO: 157, SEQ ID NO: 158, SEQ ID NO: 159, SEQ ID NO: 160, SEQ ID NO: 161, SEQ ID NO: 162, SEQ ID NO: 163, SEQ ID NO: 164, SEQ ID NO: 165, SEQ ID NO: 166, SEQ ID NO: 167, SEQ ID NO: 168, SEQ ID NO: 169, SEQ ID NO: 170, SEQ ID NO: 171, SEQ ID NO: 172, SEQ ID NO: 173, SEQ ID NO: 174, SEQ ID NO: 175, SEQ ID NO: 176, SEQ ID NO: 177, SEQ ID NO: 178, SEQ ID NO: 179, SEQ ID NO: 180, SEQ ID NO: 181, SEQ ID NO: 182, SEQ ID NO: 183, SEQ ID NO: 184, SEQ ID NO: 185, SEQ ID NO: 186, SEQ ID NO: 187, SEQ ID NO: 188, SEQ ID NO: 217, SEQ ID NO: 218, SEQ ID NO: 219, SEQ ID NO: 220, SEQ ID NO: 221, SEQ ID NO: 222, SEQ ID NO: 223, SEQ ID NO: 224, SEQ ID NO: 225, SEQ ID NO: 226, SEQ ID NO: 227, SEQ ID NO: 228, SEQ ID NO: 229, SEQ ID NO: 230, SEQ ID NO: 231, SEQ ID NO: 232, SEQ ID NO: 233, SEQ ID NO: 234, SEQ ID NO: 235, SEQ ID NO: 236, SEQ ID NO: 237, SEQ ID NO: 238, SEQ ID NO: 239, SEQ ID NO: 240, SEQ ID NO: 241, SEQ ID NO: 242, SEQ ID NO: 243, SEQ ID NO: 244, SEQ ID NO: 245, SEQ ID NO: 246, SEQ ID NO: 247, SEQ ID NO: 248, SEQ ID NO: 249, SEQ ID NO: 250, SEQ ID NO: 251, SEQ ID NO: 252, SEQ ID NO: 253, SEQ ID NO: 254, SEQ ID NO: 255, SEQ ID NO: 256, SEQ ID NO: 257, SEQ ID NO: 258, SEQ ID NO: 259, SEQ ID NO: 260, SEQ ID NO: 261, SEQ ID NO: 262, SEQ ID NO: 263, SEQ ID NO: 264, SEQ ID NO: 265, SEQ ID NO: 266, SEQ ID NO: 267, SEQ ID NO: 268, SEQ ID NO: 269, SEQ ID NO: 270, SEQ ID NO: 271, SEQ ID NO: 272, SEQ ID NO: 273, SEQ ID NO: 274, SEQ ID NO: 275, SEQ ID NO: 276, SEQ ID NO: 277, SEQ ID NO: 278, SEQ ID NO: 279, SEQ ID NO: 280, SEQ ID NO: 281, SEQ ID NO: 282, or SEQ ID NO: 283.

[0377] In some examples of any of the ABPCs described herein, the first antigen-binding domain includes a light chain variable domain comprising SEQ ID NO: 285, and a heavy chain variable domain comprising SEQ ID NO: 146, SEQ ID NO: 154, SEQ ID NO: 155, SEQ ID NO: 156, SEQ ID NO: 157, SEQ ID NO: 158, SEQ ID NO: 159, SEQ ID NO: 160, SEQ ID NO: 161, SEQ ID NO: 162, SEQ ID NO: 163, SEQ ID NO: 164, SEQ ID NO: 165, SEQ ID NO: 166, SEQ ID NO: 167, SEQ ID NO: 168, SEQ ID NO: 169, SEQ ID NO: 170, SEQ ID NO: 171, SEQ ID NO: 172, SEQ ID NO: 173, SEQ ID NO: 174, SEQ ID NO: 175, SEQ ID NO: 176, SEQ ID NO: 177, SEQ ID NO: 178, SEQ ID NO: 179, SEQ ID NO: 180, SEQ ID NO: 181, SEQ ID NO: 182, SEQ ID NO: 183, SEQ ID NO: 184, SEQ ID NO: 185, SEQ ID NO: 186, SEQ ID NO: 187, SEQ ID NO: 188, SEQ ID NO: 217, SEQ ID NO: 218, SEQ ID NO: 219, SEQ ID NO: 220, SEQ ID NO: 221, SEQ ID NO: 222, SEQ ID NO: 223, SEQ ID NO: 224, SEQ ID NO: 225, SEQ ID NO: 226, SEQ ID NO: 227, SEQ ID NO: 228, SEQ ID NO: 229, SEQ ID NO: 230, SEQ ID NO: 231, SEQ ID NO: 232, SEQ ID NO: 233, SEQ ID NO: 234, SEQ ID NO: 235, SEQ ID NO: 236, SEQ ID NO: 237, SEQ ID NO: 238, SEQ ID NO: 239, SEQ ID NO: 240, SEQ ID NO: 241, SEQ ID NO: 242, SEQ ID NO: 243, SEQ ID NO: 244, SEQ ID NO: 245, SEQ ID NO: 246, SEQ ID NO: 247, SEQ ID NO: 248, SEQ ID NO: 249, SEQ ID NO: 250, SEQ ID NO: 251, SEQ ID NO: 252, SEQ ID NO: 253, SEQ ID NO: 254, SEQ ID NO: 255, SEQ ID NO: 256, SEQ ID NO: 257, SEQ ID NO: 258, SEQ ID NO: 259, SEQ ID NO: 260, SEQ ID NO: 261, SEQ ID NO: 262, SEQ ID NO: 263, SEQ ID NO: 264, SEQ ID NO: 265, SEQ ID NO: 266, SEQ ID NO: 267, SEQ ID NO: 268, SEQ ID NO: 269, SEQ ID NO: 270, SEQ ID NO: 271, SEQ ID NO: 272, SEQ ID NO: 273, SEQ ID NO: 274, SEQ ID NO: 275, SEQ ID NO: 276, SEQ ID NO: 277, SEQ ID NO: 278, SEQ ID NO: 279, SEQ ID NO: 280, SEQ ID NO: 281, SEQ ID NO: 282, or SEQ ID NO: 283.

[0378] In some examples of any of the ABPCs described herein, the first antigen-binding domain includes a light chain variable domain comprising SEQ ID NO: 286, and a heavy chain variable domain comprising SEQ ID NO: 146, SEQ ID NO: 154, SEQ ID NO: 155, SEQ ID NO: 156, SEQ ID NO: 157, SEQ ID NO: 158, SEQ ID NO: 159, SEQ ID NO: 160, SEQ ID NO: 161, SEQ ID NO: 162, SEQ ID NO: 163, SEQ ID NO: 164, SEQ ID NO: 165, SEQ ID NO: 166, SEQ ID NO: 167, SEQ ID NO: 168, SEQ ID NO: 169, SEQ ID NO: 170, SEQ ID NO: 171, SEQ ID NO: 172, SEQ ID NO: 173, SEQ ID NO: 174, SEQ ID NO: 175, SEQ ID NO: 176, SEQ ID NO: 177, SEQ ID NO: 178, SEQ ID NO: 179, SEQ ID NO: 180, SEQ ID NO: 181, SEQ ID NO: 182, SEQ ID NO: 183, SEQ ID NO: 184, SEQ ID NO: 185, SEQ ID NO: 186, SEQ ID NO: 187, SEQ ID NO: 188, SEQ ID NO: 217, SEQ ID NO: 218, SEQ ID NO: 219, SEQ ID NO: 220, SEQ ID NO: 221, SEQ ID NO: 222, SEQ ID NO: 223, SEQ ID NO: 224, SEQ ID NO: 225, SEQ ID NO: 226, SEQ ID NO: 227, SEQ ID NO: 228, SEQ ID NO: 229, SEQ ID NO: 230, SEQ ID NO: 231, SEQ ID NO: 232, SEQ ID NO: 233, SEQ ID NO: 234, SEQ ID NO: 235, SEQ ID NO: 236, SEQ ID NO: 237, SEQ ID NO: 238, SEQ ID NO: 239, SEQ ID NO: 240, SEQ ID NO: 241, SEQ ID NO: 242, SEQ ID NO: 243, SEQ ID NO: 244, SEQ ID NO: 245, SEQ ID NO: 246, SEQ ID NO: 247, SEQ ID NO: 248, SEQ ID NO: 249, SEQ ID NO: 250, SEQ ID NO: 251, SEQ ID NO: 252, SEQ ID NO: 253, SEQ ID NO: 254, SEQ ID NO: 255, SEQ ID NO: 256, SEQ ID NO: 257, SEQ ID NO: 258, SEQ ID NO: 259, SEQ ID NO: 260, SEQ ID NO: 261, SEQ ID NO: 262, SEQ ID NO: 263, SEQ ID NO: 264, SEQ ID NO: 265, SEQ ID NO: 266, SEQ ID NO: 267, SEQ ID NO: 268, SEQ ID NO: 269, SEQ ID NO: 270, SEQ ID NO: 271, SEQ ID NO: 272, SEQ ID NO: 273, SEQ ID NO: 274, SEQ ID NO: 275, SEQ ID NO: 276, SEQ ID NO: 277, SEQ ID NO: 278, SEQ ID NO: 279, SEQ ID NO: 280, SEQ ID NO: 281, SEQ ID NO: 282, or SEQ ID NO: 283.

[0379] In some examples of any of the ABPCs described herein, the first antigen-binding domain includes a light chain variable domain comprising SEQ ID NO: 287, and a heavy chain variable domain comprising SEQ ID NO: 146, SEQ ID NO: 154, SEQ ID NO: 155, SEQ ID NO: 156, SEQ ID NO: 157, SEQ ID NO: 158, SEQ ID NO: 159, SEQ ID NO: 160, SEQ ID NO: 161, SEQ ID NO: 162, SEQ ID NO: 163, SEQ ID NO: 164, SEQ ID NO: 165, SEQ ID NO: 166, SEQ ID NO: 167, SEQ ID NO: 168, SEQ ID NO: 169, SEQ ID NO: 170, SEQ ID NO: 171, SEQ ID NO: 172, SEQ ID NO: 173, SEQ ID NO: 174, SEQ ID NO: 175, SEQ ID NO: 176, SEQ ID NO: 177, SEQ ID NO: 178, SEQ ID NO: 179, SEQ ID NO: 180, SEQ ID NO: 181, SEQ ID NO: 182, SEQ ID NO: 183, SEQ ID NO: 184, SEQ ID NO: 185, SEQ ID NO: 186, SEQ ID NO: 187, SEQ ID NO: 188, SEQ ID NO: 217, SEQ ID NO: 218, SEQ ID NO: 219, SEQ ID NO: 220, SEQ ID NO: 221, SEQ ID NO: 222, SEQ ID NO: 223, SEQ ID NO: 224, SEQ ID NO: 225, SEQ ID NO: 226, SEQ ID NO: 227, SEQ ID NO: 228, SEQ ID NO: 229, SEQ ID NO: 230, SEQ ID NO: 231, SEQ ID NO: 232, SEQ ID NO: 233, SEQ ID NO: 234, SEQ ID NO: 235, SEQ ID NO: 236, SEQ ID NO: 237, SEQ ID NO: 238, SEQ ID NO: 239, SEQ ID NO: 240, SEQ ID NO: 241, SEQ ID NO: 242, SEQ ID NO: 243, SEQ ID NO: 244, SEQ ID NO: 245, SEQ ID NO: 246, SEQ ID NO: 247, SEQ ID NO: 248, SEQ ID NO: 249, SEQ ID NO: 250, SEQ ID NO: 251, SEQ ID NO: 252, SEQ ID NO: 253, SEQ ID NO: 254, SEQ ID NO: 255, SEQ ID NO: 256, SEQ ID NO: 257, SEQ ID NO: 258, SEQ ID NO: 259, SEQ ID NO: 260, SEQ ID NO: 261, SEQ ID NO: 262, SEQ ID NO: 263, SEQ ID NO: 264, SEQ ID NO: 265, SEQ ID NO: 266, SEQ ID NO: 267, SEQ ID NO: 268, SEQ ID NO: 269, SEQ ID NO: 270, SEQ ID NO: 271, SEQ ID NO: 272, SEQ ID NO: 273, SEQ ID NO: 274, SEQ ID NO: 275, SEQ ID NO: 276, SEQ ID NO: 277, SEQ ID NO: 278, SEQ ID NO: 279, SEQ ID NO: 280, SEQ ID NO: 281, SEQ ID NO: 282, or SEQ ID NO: 283.

[0380] In some examples of any of the ABPCs described herein, the first antigen-binding domain includes a light chain variable domain comprising SEQ ID NO: 288, and a heavy chain variable domain comprising SEQ ID NO: 146, SEQ ID NO: 154, SEQ ID NO: 155, SEQ ID NO: 156, SEQ ID NO: 157, SEQ ID NO: 158, SEQ ID NO: 159, SEQ ID NO: 160, SEQ ID NO: 161, SEQ ID NO: 162, SEQ ID NO: 163, SEQ ID NO: 164, SEQ ID NO: 165, SEQ ID NO: 166, SEQ ID NO: 167, SEQ ID NO: 168, SEQ ID NO: 169, SEQ ID NO: 170, SEQ ID NO: 171, SEQ ID NO: 172, SEQ ID NO: 173, SEQ ID NO: 174, SEQ ID NO: 175, SEQ ID NO: 176, SEQ ID NO: 177, SEQ ID NO: 178, SEQ ID NO: 179, SEQ ID NO: 180, SEQ ID NO: 181, SEQ ID NO: 182, SEQ ID NO: 183, SEQ ID NO: 184, SEQ ID NO: 185, SEQ ID NO: 186, SEQ ID NO: 187, SEQ ID NO: 188, SEQ ID NO: 217, SEQ ID NO: 218, SEQ ID NO: 219, SEQ ID NO: 220, SEQ ID NO: 221, SEQ ID NO: 222, SEQ ID NO: 223, SEQ ID NO: 224, SEQ ID NO: 225, SEQ ID NO: 226, SEQ ID NO: 227, SEQ ID NO: 228, SEQ ID NO: 229, SEQ ID NO: 230, SEQ ID NO: 231, SEQ ID NO: 232, SEQ ID NO: 233, SEQ ID NO: 234, SEQ ID NO: 235, SEQ ID NO: 236, SEQ ID NO: 237, SEQ ID NO: 238, SEQ ID NO: 239, SEQ ID NO: 240, SEQ ID NO: 241, SEQ ID NO: 242, SEQ ID NO: 243, SEQ ID NO: 244, SEQ ID NO: 245, SEQ ID NO: 246, SEQ ID NO: 247, SEQ ID NO: 248, SEQ ID NO: 249, SEQ ID NO: 250, SEQ ID NO: 251, SEQ ID NO: 252, SEQ ID NO: 253, SEQ ID NO: 254, SEQ ID NO: 255, SEQ ID NO: 256, SEQ ID NO: 257, SEQ ID NO: 258, SEQ ID NO: 259, SEQ ID NO: 260, SEQ ID NO: 261, SEQ ID NO: 262, SEQ ID NO: 263, SEQ ID NO: 264, SEQ ID NO: 265, SEQ ID NO: 266, SEQ ID NO: 267, SEQ ID NO: 268, SEQ ID NO: 269, SEQ ID NO: 270, SEQ ID NO: 271, SEQ ID NO: 272, SEQ ID NO: 273, SEQ ID NO: 274, SEQ ID NO: 275, SEQ ID NO: 276, SEQ ID NO: 277, SEQ ID NO: 278, SEQ ID NO: 279, SEQ ID NO: 280, SEQ ID NO: 281, SEQ ID NO: 282, or SEQ ID NO: 283.

[0381] In some examples of any of the ABPCs described herein, the first antigen-binding domain includes a light chain variable domain comprising SEQ ID NO: 289, and a heavy chain variable domain comprising SEQ ID NO: 146, SEQ ID NO: 154, SEQ ID NO: 155, SEQ ID NO: 156, SEQ ID NO: 157, SEQ ID NO: 158, SEQ ID NO: 159, SEQ ID NO: 160, SEQ ID NO: 161, SEQ ID NO: 162, SEQ ID NO: 163, SEQ ID NO: 164, SEQ ID NO: 165, SEQ ID NO: 166, SEQ ID NO: 167, SEQ ID NO: 168, SEQ ID NO: 169, SEQ ID NO: 170, SEQ ID NO: 171, SEQ ID NO: 172, SEQ ID NO: 173, SEQ ID NO: 174, SEQ ID NO: 175, SEQ ID NO: 176, SEQ ID NO: 177, SEQ ID NO: 178, SEQ ID NO: 179, SEQ ID NO: 180, SEQ ID NO: 181, SEQ ID NO: 182, SEQ ID NO: 183, SEQ ID NO: 184, SEQ ID NO: 185, SEQ ID NO: 186, SEQ ID NO: 187, SEQ ID NO: 188, SEQ ID NO: 217, SEQ ID NO: 218, SEQ ID NO: 219, SEQ ID NO: 220, SEQ ID NO: 221, SEQ ID NO: 222, SEQ ID NO: 223, SEQ ID NO: 224, SEQ ID NO: 225, SEQ ID NO: 226, SEQ ID NO: 227, SEQ ID NO: 228, SEQ ID NO: 229, SEQ ID NO: 230, SEQ ID NO: 231, SEQ ID NO: 232, SEQ ID NO: 233, SEQ ID NO: 234, SEQ ID NO: 235, SEQ ID NO: 236, SEQ ID NO: 237, SEQ ID NO: 238, SEQ ID NO: 239, SEQ ID NO: 240, SEQ ID NO: 241, SEQ ID NO: 242, SEQ ID NO: 243, SEQ ID NO: 244, SEQ ID NO: 245, SEQ ID NO: 246, SEQ ID NO: 247, SEQ ID NO: 248, SEQ ID NO: 249, SEQ ID NO: 250, SEQ ID NO: 251, SEQ ID NO: 252, SEQ ID NO: 253, SEQ ID NO: 254, SEQ ID NO: 255, SEQ ID NO: 256, SEQ ID NO: 257, SEQ ID NO: 258, SEQ ID NO: 259, SEQ ID NO: 260, SEQ ID NO: 261, SEQ ID NO: 262, SEQ ID NO: 263, SEQ ID NO: 264, SEQ ID NO: 265, SEQ ID NO: 266, SEQ ID NO: 267, SEQ ID NO: 268, SEQ ID NO: 269, SEQ ID NO: 270, SEQ ID NO: 271, SEQ ID NO: 272, SEQ ID NO: 273, SEQ ID NO: 274, SEQ ID NO: 275, SEQ ID NO: 276, SEQ ID NO: 277, SEQ ID NO: 278, SEQ ID NO: 279, SEQ ID NO: 280, SEQ ID NO: 281, SEQ ID NO: 282, or SEQ ID NO: 283.

[0382] In some examples of any of the ABPCs described herein, the first antigen-binding domain includes a light chain variable domain comprising SEQ ID NO: 290, and a heavy chain variable domain comprising SEQ ID NO: 146, SEQ ID NO: 154, SEQ ID NO: 155, SEQ ID NO: 156, SEQ ID NO: 157, SEQ ID NO: 158, SEQ ID NO: 159, SEQ ID NO: 160, SEQ ID NO: 161, SEQ ID NO: 162, SEQ ID NO: 163, SEQ ID NO: 164, SEQ ID NO: 165, SEQ ID NO: 166, SEQ ID NO: 167, SEQ ID NO: 168, SEQ ID NO: 169, SEQ ID NO: 170, SEQ ID NO: 171, SEQ ID NO: 172, SEQ ID NO: 173, SEQ ID NO: 174, SEQ ID NO: 175, SEQ ID NO: 176, SEQ ID NO: 177, SEQ ID NO: 178, SEQ ID NO: 179, SEQ ID NO: 180, SEQ ID NO: 181, SEQ ID NO: 182, SEQ ID NO: 183, SEQ ID NO: 184, SEQ ID NO: 185, SEQ ID NO: 186, SEQ ID NO: 187, SEQ ID NO: 188, SEQ ID NO: 217, SEQ ID NO: 218, SEQ ID NO: 219, SEQ ID NO: 220, SEQ ID NO: 221, SEQ ID NO: 222, SEQ ID NO: 223, SEQ ID NO: 224, SEQ ID NO: 225, SEQ ID NO: 226, SEQ ID NO: 227, SEQ ID NO: 228, SEQ ID NO: 229, SEQ ID NO: 230, SEQ ID NO: 231, SEQ ID NO: 232, SEQ ID NO: 233, SEQ ID NO: 234, SEQ ID NO: 235, SEQ ID NO: 236, SEQ ID NO: 237, SEQ ID NO: 238, SEQ ID NO: 239, SEQ ID NO: 240, SEQ ID NO: 241, SEQ ID NO: 242, SEQ ID NO: 243, SEQ ID NO: 244, SEQ ID NO: 245, SEQ ID NO: 246, SEQ ID NO: 247, SEQ ID NO: 248, SEQ ID NO: 249, SEQ ID NO: 250, SEQ ID NO: 251, SEQ ID NO: 252, SEQ ID NO: 253, SEQ ID NO: 254, SEQ ID NO: 255, SEQ ID NO: 256, SEQ ID NO: 257, SEQ ID NO: 258, SEQ ID NO: 259, SEQ ID NO: 260, SEQ ID NO: 261, SEQ ID NO: 262, SEQ ID NO: 263, SEQ ID NO: 264, SEQ ID NO: 265, SEQ ID NO: 266, SEQ ID NO: 267, SEQ ID NO: 268, SEQ ID NO: 269, SEQ ID NO: 270, SEQ ID NO: 271, SEQ ID NO: 272, SEQ ID NO: 273, SEQ ID NO: 274, SEQ ID NO: 275, SEQ ID NO: 276, SEQ ID NO: 277, SEQ ID NO: 278, SEQ ID NO: 279, SEQ ID NO: 280, SEQ ID NO: 281, SEQ ID NO: 282, or SEQ ID NO: 283.

[0383] In some examples of any of the ABPCs described herein, the first antigen-binding domain includes a light chain variable domain comprising SEQ ID NO: 291, and a heavy chain variable domain comprising SEQ ID NO: 146, SEQ ID NO: 154, SEQ ID NO: 155, SEQ ID NO: 156, SEQ ID NO: 157, SEQ ID NO: 158, SEQ ID NO: 159, SEQ ID NO: 160, SEQ ID NO: 161, SEQ ID NO: 162, SEQ ID NO: 163, SEQ ID NO: 164, SEQ ID NO: 165, SEQ ID NO: 166, SEQ ID NO: 167, SEQ ID NO: 168, SEQ ID NO: 169, SEQ ID NO: 170, SEQ ID NO: 171, SEQ ID NO: 172, SEQ ID NO: 173, SEQ ID NO: 174, SEQ ID NO: 175, SEQ ID NO: 176, SEQ ID NO: 177, SEQ ID NO: 178, SEQ ID NO: 179, SEQ ID NO: 180, SEQ ID NO: 181, SEQ ID NO: 182, SEQ ID NO: 183, SEQ ID NO: 184, SEQ ID NO: 185, SEQ ID NO: 186, SEQ ID NO: 187, SEQ ID NO: 188, SEQ ID NO: 217, SEQ ID NO: 218, SEQ ID NO: 219, SEQ ID NO: 220, SEQ ID NO: 221, SEQ ID NO: 222, SEQ ID NO: 223, SEQ ID NO: 224, SEQ ID NO: 225, SEQ ID NO: 226, SEQ ID NO: 227, SEQ ID NO: 228, SEQ ID NO: 229, SEQ ID NO: 230, SEQ ID NO: 231, SEQ ID NO: 232, SEQ ID NO: 233, SEQ ID NO: 234, SEQ ID NO: 235, SEQ ID NO: 236, SEQ ID NO: 237, SEQ ID NO: 238, SEQ ID NO: 239, SEQ ID NO: 240, SEQ ID NO: 241, SEQ ID NO: 242, SEQ ID NO: 243, SEQ ID NO: 244, SEQ ID NO: 245, SEQ ID NO: 246, SEQ ID NO: 247, SEQ ID NO: 248, SEQ ID NO: 249, SEQ ID NO: 250, SEQ ID NO: 251, SEQ ID NO: 252, SEQ ID NO: 253, SEQ ID NO: 254, SEQ ID NO: 255, SEQ ID NO: 256, SEQ ID NO: 257, SEQ ID NO: 258, SEQ ID NO: 259, SEQ ID NO: 260, SEQ ID NO: 261, SEQ ID NO: 262, SEQ ID NO: 263, SEQ ID NO: 264, SEQ ID NO: 265, SEQ ID NO: 266, SEQ ID NO: 267, SEQ ID NO: 268, SEQ ID NO: 269, SEQ ID NO: 270, SEQ ID NO: 271, SEQ ID NO: 272, SEQ ID NO: 273, SEQ ID NO: 274, SEQ ID NO: 275, SEQ ID NO: 276, SEQ ID NO: 277, SEQ ID NO: 278, SEQ ID NO: 279, SEQ ID NO: 280, SEQ ID NO: 281, SEQ ID NO: 282, or SEQ ID NO: 283.

[0384] In some examples of any of the ABPCs described herein, the first antigen-binding domain includes a light chain variable domain comprising SEQ ID NO: 292, and a heavy chain variable domain comprising SEQ ID NO: 146, SEQ ID NO: 154, SEQ ID NO: 155, SEQ ID NO: 156, SEQ ID NO: 157, SEQ ID NO: 158, SEQ ID NO: 159, SEQ ID NO: 160, SEQ ID NO: 161, SEQ ID NO: 162, SEQ ID NO: 163, SEQ ID NO: 164, SEQ ID NO: 165, SEQ ID NO: 166, SEQ ID NO: 167, SEQ ID NO: 168, SEQ ID NO: 169, SEQ ID NO: 170, SEQ ID NO: 171, SEQ ID NO: 172, SEQ ID NO: 173, SEQ ID NO: 174, SEQ ID NO: 175, SEQ ID NO: 176, SEQ ID NO: 177, SEQ ID NO: 178, SEQ ID NO: 179, SEQ ID NO: 180, SEQ ID NO: 181, SEQ ID NO: 182, SEQ ID NO: 183, SEQ ID NO: 184, SEQ ID NO: 185, SEQ ID NO: 186, SEQ ID NO: 187, SEQ ID NO: 188, SEQ ID NO: 217, SEQ ID NO: 218, SEQ ID NO: 219, SEQ ID NO: 220, SEQ ID NO: 221, SEQ ID NO: 222, SEQ ID NO: 223, SEQ ID NO: 224, SEQ ID NO: 225, SEQ ID NO: 226, SEQ ID NO: 227, SEQ ID NO: 228, SEQ ID NO: 229, SEQ ID NO: 230, SEQ ID NO: 231, SEQ ID NO: 232, SEQ ID NO: 233, SEQ ID NO: 234, SEQ ID NO: 235, SEQ ID NO: 236, SEQ ID NO: 237, SEQ ID NO: 238, SEQ ID NO: 239, SEQ ID NO: 240, SEQ ID NO: 241, SEQ ID NO: 242, SEQ ID NO: 243, SEQ ID NO: 244, SEQ ID NO: 245, SEQ ID NO: 246, SEQ ID NO: 247, SEQ ID NO: 248, SEQ ID NO: 249, SEQ ID NO: 250, SEQ ID NO: 251, SEQ ID NO: 252, SEQ ID NO: 253, SEQ ID NO: 254, SEQ ID NO: 255, SEQ ID NO: 256, SEQ ID NO: 257, SEQ ID NO: 258, SEQ ID NO: 259, SEQ ID NO: 260, SEQ ID NO: 261, SEQ ID NO: 262, SEQ ID NO: 263, SEQ ID NO: 264, SEQ ID NO: 265, SEQ ID NO: 266, SEQ ID NO: 267, SEQ ID NO: 268, SEQ ID NO: 269, SEQ ID NO: 270, SEQ ID NO: 271, SEQ ID NO: 272, SEQ ID NO: 273, SEQ ID NO: 274, SEQ ID NO: 275, SEQ ID NO: 276, SEQ ID NO: 277, SEQ ID NO: 278, SEQ ID NO: 279, SEQ ID NO: 280, SEQ ID NO: 281, SEQ ID NO: 282, or SEQ ID NO: 283.

[0385] In some examples of any of the ABPCs described herein, the first antigen-binding domain includes a light chain variable domain comprising SEQ ID NO: 293, and a heavy chain variable domain comprising SEQ ID NO: 146, SEQ ID NO: 154, SEQ ID NO: 155, SEQ ID NO: 156, SEQ ID NO: 157, SEQ ID NO: 158, SEQ ID NO: 159, SEQ ID NO: 160, SEQ ID NO: 161, SEQ ID NO: 162, SEQ ID NO: 163, SEQ ID NO: 164, SEQ ID NO: 165, SEQ ID NO: 166, SEQ ID NO: 167, SEQ ID NO: 168, SEQ ID NO: 169, SEQ ID NO: 170, SEQ ID NO: 171, SEQ ID NO: 172, SEQ ID NO: 173, SEQ ID NO: 174, SEQ ID NO: 175, SEQ ID NO: 176, SEQ ID NO: 177, SEQ ID NO: 178, SEQ ID NO: 179, SEQ ID NO: 180, SEQ ID NO: 181, SEQ ID NO: 182, SEQ ID NO: 183, SEQ ID NO: 184, SEQ ID NO: 185, SEQ ID NO: 186, SEQ ID NO: 187, SEQ ID NO: 188, SEQ ID NO: 217, SEQ ID NO: 218, SEQ ID NO: 219, SEQ ID NO: 220, SEQ ID NO: 221, SEQ ID NO: 222, SEQ ID NO: 223, SEQ ID NO: 224, SEQ ID NO: 225, SEQ ID NO: 226, SEQ ID NO: 227, SEQ ID NO: 228, SEQ ID NO: 229, SEQ ID NO: 230, SEQ ID NO: 231, SEQ ID NO: 232, SEQ ID NO: 233, SEQ ID NO: 234, SEQ ID NO: 235, SEQ ID NO: 236, SEQ ID NO: 237, SEQ ID NO: 238, SEQ ID NO: 239, SEQ ID NO: 240, SEQ ID NO: 241, SEQ ID NO: 242, SEQ ID NO: 243, SEQ ID NO: 244, SEQ ID NO: 245, SEQ ID NO: 246, SEQ ID NO: 247, SEQ ID NO: 248, SEQ ID NO: 249, SEQ ID NO: 250, SEQ ID NO: 251, SEQ ID NO: 252, SEQ ID NO: 253, SEQ ID NO: 254, SEQ ID NO: 255, SEQ ID NO: 256, SEQ ID NO: 257, SEQ ID NO: 258, SEQ ID NO: 259, SEQ ID NO: 260, SEQ ID NO: 261, SEQ ID NO: 262, SEQ ID NO: 263, SEQ ID NO: 264, SEQ ID NO: 265, SEQ ID NO: 266, SEQ ID NO: 267, SEQ ID NO: 268, SEQ ID NO: 269, SEQ ID NO: 270, SEQ ID NO: 271, SEQ ID NO: 272, SEQ ID NO: 273, SEQ ID NO: 274, SEQ ID NO: 275, SEQ ID NO: 276, SEQ ID NO: 277, SEQ ID NO: 278, SEQ ID NO: 279, SEQ ID NO: 280, SEQ ID NO: 281, SEQ ID NO: 282, or SEQ ID NO: 283.

[0386] In some examples of any of the ABPCs described herein, the first antigen-binding domain includes a light chain variable domain comprising SEQ ID NO: 294, and a heavy chain variable domain comprising SEQ ID NO: 146, SEQ ID NO: 154, SEQ ID NO: 155, SEQ ID NO: 156, SEQ ID NO: 157, SEQ ID NO: 158, SEQ ID NO: 159, SEQ ID NO: 160, SEQ ID NO: 161, SEQ ID NO: 162, SEQ ID NO: 163, SEQ ID NO: 164, SEQ ID NO: 165, SEQ ID NO: 166, SEQ ID NO: 167, SEQ ID NO: 168, SEQ ID NO: 169, SEQ ID NO: 170, SEQ ID NO: 171, SEQ ID NO: 172, SEQ ID NO: 173, SEQ ID NO: 174, SEQ ID NO: 175, SEQ ID NO: 176, SEQ ID NO: 177, SEQ ID NO: 178, SEQ ID NO: 179, SEQ ID NO: 180, SEQ ID NO: 181, SEQ ID NO: 182, SEQ ID NO: 183, SEQ ID NO: 184, SEQ ID NO: 185, SEQ ID NO: 186, SEQ ID NO: 187, SEQ ID NO: 188, SEQ ID NO: 217, SEQ ID NO: 218, SEQ ID NO: 219, SEQ ID NO: 220, SEQ ID NO: 221, SEQ ID NO: 222, SEQ ID NO: 223, SEQ ID NO: 224, SEQ ID NO: 225, SEQ ID NO: 226, SEQ ID NO: 227, SEQ ID NO: 228, SEQ ID NO: 229, SEQ ID NO: 230, SEQ ID NO: 231, SEQ ID NO: 232, SEQ ID NO: 233, SEQ ID NO: 234, SEQ ID NO: 235, SEQ ID NO: 236, SEQ ID NO: 237, SEQ ID NO: 238, SEQ ID NO: 239, SEQ ID NO: 240, SEQ ID NO: 241, SEQ ID NO: 242, SEQ ID NO: 243, SEQ ID NO: 244, SEQ ID NO: 245, SEQ ID NO: 246, SEQ ID NO: 247, SEQ ID NO: 248, SEQ ID NO: 249, SEQ ID NO: 250, SEQ ID NO: 251, SEQ ID NO: 252, SEQ ID NO: 253, SEQ ID NO: 254, SEQ ID NO: 255, SEQ ID NO: 256, SEQ ID NO: 257, SEQ ID NO: 258, SEQ ID NO: 259, SEQ ID NO: 260, SEQ ID NO: 261, SEQ ID NO: 262, SEQ ID NO: 263, SEQ ID NO: 264, SEQ ID NO: 265, SEQ ID NO: 266, SEQ ID NO: 267, SEQ ID NO: 268, SEQ ID NO: 269, SEQ ID NO: 270, SEQ ID NO: 271, SEQ ID NO: 272, SEQ ID NO: 273, SEQ ID NO: 274, SEQ ID NO: 275, SEQ ID NO: 276, SEQ ID NO: 277, SEQ ID NO: 278, SEQ ID NO: 279, SEQ ID NO: 280, SEQ ID NO: 281, SEQ ID NO: 282, or SEQ ID NO: 283.

[0387] In some examples of any of the ABPCs described herein, the first antigen-binding domain includes a light chain variable domain comprising SEQ ID NO: 295, and a heavy chain variable domain comprising SEQ ID NO: 146, SEQ ID NO: 154, SEQ ID NO: 155, SEQ ID NO: 156, SEQ ID NO: 157, SEQ ID NO: 158, SEQ ID NO: 159, SEQ ID NO: 160, SEQ ID NO: 161, SEQ ID NO: 162, SEQ ID NO: 163, SEQ ID NO: 164, SEQ ID NO: 165, SEQ ID NO: 166, SEQ ID NO: 167, SEQ ID NO: 168, SEQ ID NO: 169, SEQ ID NO: 170, SEQ ID NO: 171, SEQ ID NO: 172, SEQ ID NO: 173, SEQ ID NO: 174, SEQ ID NO: 175, SEQ ID NO: 176, SEQ ID NO: 177, SEQ ID NO: 178, SEQ ID NO: 179, SEQ ID NO: 180, SEQ ID NO: 181, SEQ ID NO: 182, SEQ ID NO: 183, SEQ ID NO: 184, SEQ ID NO: 185, SEQ ID NO: 186, SEQ ID NO: 187, SEQ ID NO: 188, SEQ ID NO: 217, SEQ ID NO: 218, SEQ ID NO: 219, SEQ ID NO: 220, SEQ ID NO: 221, SEQ ID NO: 222, SEQ ID NO: 223, SEQ ID NO: 224, SEQ ID NO: 225, SEQ ID NO: 226, SEQ ID NO: 227, SEQ ID NO: 228, SEQ ID NO: 229, SEQ ID NO: 230, SEQ ID NO: 231, SEQ ID NO: 232, SEQ ID NO: 233, SEQ ID NO: 234, SEQ ID NO: 235, SEQ ID NO: 236, SEQ ID NO: 237, SEQ ID NO: 238, SEQ ID NO: 239, SEQ ID NO: 240, SEQ ID NO: 241, SEQ ID NO: 242, SEQ ID NO: 243, SEQ ID NO: 244, SEQ ID NO: 245, SEQ ID NO: 246, SEQ ID NO: 247, SEQ ID NO: 248, SEQ ID NO: 249, SEQ ID NO: 250, SEQ ID NO: 251, SEQ ID NO: 252, SEQ ID NO: 253, SEQ ID NO: 254, SEQ ID NO: 255, SEQ ID NO: 256, SEQ ID NO: 257, SEQ ID NO: 258, SEQ ID NO: 259, SEQ ID NO: 260, SEQ ID NO: 261, SEQ ID NO: 262, SEQ ID NO: 263, SEQ ID NO: 264, SEQ ID NO: 265, SEQ ID NO: 266, SEQ ID NO: 267, SEQ ID NO: 268, SEQ ID NO: 269, SEQ ID NO: 270, SEQ ID NO: 271, SEQ ID NO: 272, SEQ ID NO: 273, SEQ ID NO: 274, SEQ ID NO: 275, SEQ ID NO: 276, SEQ ID NO: 277, SEQ ID NO: 278, SEQ ID NO: 279, SEQ ID NO: 280, SEQ ID NO: 281, SEQ ID NO: 282, or SEQ ID NO: 283.

[0388] In some examples of any of the ABPCs described herein, the first antigen-binding domain includes a light chain variable domain comprising SEQ ID NO: 296, and a heavy chain variable domain comprising SEQ ID NO: 146, SEQ ID NO: 154, SEQ ID NO: 155, SEQ ID NO: 156, SEQ ID NO: 157, SEQ ID NO: 158, SEQ ID NO: 159, SEQ ID NO: 160, SEQ ID NO: 161, SEQ ID NO: 162, SEQ ID NO: 163, SEQ ID NO: 164, SEQ ID NO: 165, SEQ ID NO: 166, SEQ ID NO: 167, SEQ ID NO: 168, SEQ ID NO: 169, SEQ ID NO: 170, SEQ ID NO: 171, SEQ ID NO: 172, SEQ ID NO: 173, SEQ ID NO: 174, SEQ ID NO: 175, SEQ ID NO: 176, SEQ ID NO: 177, SEQ ID NO: 178, SEQ ID NO: 179, SEQ ID NO: 180, SEQ ID NO: 181, SEQ ID NO: 182, SEQ ID NO: 183, SEQ ID NO: 184, SEQ ID NO: 185, SEQ ID NO: 186, SEQ ID NO: 187, SEQ ID NO: 188, SEQ ID NO: 217, SEQ ID NO: 218, SEQ ID NO: 219, SEQ ID NO: 220, SEQ ID NO: 221, SEQ ID NO: 222, SEQ ID NO: 223, SEQ ID NO: 224, SEQ ID NO: 225, SEQ ID NO: 226, SEQ ID NO: 227, SEQ ID NO: 228, SEQ ID NO: 229, SEQ ID NO: 230, SEQ ID NO: 231, SEQ ID NO: 232, SEQ ID NO: 233, SEQ ID NO: 234, SEQ ID NO: 235, SEQ ID NO: 236, SEQ ID NO: 237, SEQ ID NO: 238, SEQ ID NO: 239, SEQ ID NO: 240, SEQ ID NO: 241, SEQ ID NO: 242, SEQ ID NO: 243, SEQ ID NO: 244, SEQ ID NO: 245, SEQ ID NO: 246, SEQ ID NO: 247, SEQ ID NO: 248, SEQ ID NO: 249, SEQ ID NO: 250, SEQ ID NO: 251, SEQ ID NO: 252, SEQ ID NO: 253, SEQ ID NO: 254, SEQ ID NO: 255, SEQ ID NO: 256, SEQ ID NO: 257, SEQ ID NO: 258, SEQ ID NO: 259, SEQ ID NO: 260, SEQ ID NO: 261, SEQ ID NO: 262, SEQ ID NO: 263, SEQ ID NO: 264, SEQ ID NO: 265, SEQ ID NO: 266, SEQ ID NO: 267, SEQ ID NO: 268, SEQ ID NO: 269, SEQ ID NO: 270, SEQ ID NO: 271, SEQ ID NO: 272, SEQ ID NO: 273, SEQ ID NO: 274, SEQ ID NO: 275, SEQ ID NO: 276, SEQ ID NO: 277, SEQ ID NO: 278, SEQ ID NO: 279, SEQ ID NO: 280, SEQ ID NO: 281, SEQ ID NO: 282, or SEQ ID NO: 283.

[0389] In some examples of any of the ABPCs described herein, the first antigen-binding domain includes a light chain variable domain comprising SEQ ID NO: 297, and a heavy chain variable domain comprising SEQ ID NO: 146, SEQ ID NO: 154, SEQ ID NO: 155, SEQ ID NO: 156, SEQ ID NO: 157, SEQ ID NO: 158, SEQ ID NO: 159, SEQ ID NO: 160, SEQ ID NO: 161, SEQ ID NO: 162, SEQ ID NO: 163, SEQ ID NO: 164, SEQ ID NO: 165, SEQ ID NO: 166, SEQ ID NO: 167, SEQ ID NO: 168, SEQ ID NO: 169, SEQ ID NO: 170, SEQ ID NO: 171, SEQ ID NO: 172, SEQ ID NO: 173, SEQ ID NO: 174, SEQ ID NO: 175, SEQ ID NO: 176, SEQ ID NO: 177, SEQ ID NO: 178, SEQ ID NO: 179, SEQ ID NO: 180, SEQ ID NO: 181, SEQ ID NO: 182, SEQ ID NO: 183, SEQ ID NO: 184, SEQ ID NO: 185, SEQ ID NO: 186, SEQ ID NO: 187, SEQ ID NO: 188, SEQ ID NO: 217, SEQ ID NO: 218, SEQ ID NO: 219, SEQ ID NO: 220, SEQ ID NO: 221, SEQ ID NO: 222, SEQ ID NO: 223, SEQ ID NO: 224, SEQ ID NO: 225, SEQ ID NO: 226, SEQ ID NO: 227, SEQ ID NO: 228, SEQ ID NO: 229, SEQ ID NO: 230, SEQ ID NO: 231, SEQ ID NO: 232, SEQ ID NO: 233, SEQ ID NO: 234, SEQ ID NO: 235, SEQ ID NO: 236, SEQ ID NO: 237, SEQ ID NO: 238, SEQ ID NO: 239, SEQ ID NO: 240, SEQ ID NO: 241, SEQ ID NO: 242, SEQ ID NO: 243, SEQ ID NO: 244, SEQ ID NO: 245, SEQ ID NO: 246, SEQ ID NO: 247, SEQ ID NO: 248, SEQ ID NO: 249, SEQ ID NO: 250, SEQ ID NO: 251, SEQ ID NO: 252, SEQ ID NO: 253, SEQ ID NO: 254, SEQ ID NO: 255, SEQ ID NO: 256, SEQ ID NO: 257, SEQ ID NO: 258, SEQ ID NO: 259, SEQ ID NO: 260, SEQ ID NO: 261, SEQ ID NO: 262, SEQ ID NO: 263, SEQ ID NO: 264, SEQ ID NO: 265, SEQ ID NO: 266, SEQ ID NO: 267, SEQ ID NO: 268, SEQ ID NO: 269, SEQ ID NO: 270, SEQ ID NO: 271, SEQ ID NO: 272, SEQ ID NO: 273, SEQ ID NO: 274, SEQ ID NO: 275, SEQ ID NO: 276, SEQ ID NO: 277, SEQ ID NO: 278, SEQ ID NO: 279, SEQ ID NO: 280, SEQ ID NO: 281, SEQ ID NO: 282, or SEQ ID NO: 283.

[0390] In some examples of any of the ABPCs described herein, the first antigen-binding domain includes a light chain variable domain comprising SEQ ID NO: 298, and a heavy chain variable domain comprising SEQ ID NO: 146, SEQ ID NO: 154, SEQ ID NO: 155, SEQ ID NO: 156, SEQ ID NO: 157, SEQ ID NO: 158, SEQ ID NO: 159, SEQ ID NO: 160, SEQ ID NO: 161, SEQ ID NO: 162, SEQ ID NO: 163, SEQ ID NO: 164, SEQ ID NO: 165, SEQ ID NO: 166, SEQ ID NO: 167, SEQ ID NO: 168, SEQ ID NO: 169, SEQ ID NO: 170, SEQ ID NO: 171, SEQ ID NO: 172, SEQ ID NO: 173, SEQ ID NO: 174, SEQ ID NO: 175, SEQ ID NO: 176, SEQ ID NO: 177, SEQ ID NO: 178, SEQ ID NO: 179, SEQ ID NO: 180, SEQ ID NO: 181, SEQ ID NO: 182, SEQ ID NO: 183, SEQ ID NO: 184, SEQ ID NO: 185, SEQ ID NO: 186, SEQ ID NO: 187, SEQ ID NO: 188, SEQ ID NO: 217, SEQ ID NO: 218, SEQ ID NO: 219, SEQ ID NO: 220, SEQ ID NO: 221, SEQ ID NO: 222, SEQ ID NO: 223, SEQ ID NO: 224, SEQ ID NO: 225, SEQ ID NO: 226, SEQ ID NO: 227, SEQ ID NO: 228, SEQ ID NO: 229, SEQ ID NO: 230, SEQ ID NO: 231, SEQ ID NO: 232, SEQ ID NO: 233, SEQ ID NO: 234, SEQ ID NO: 235, SEQ ID NO: 236, SEQ ID NO: 237, SEQ ID NO: 238, SEQ ID NO: 239, SEQ ID NO: 240, SEQ ID NO: 241, SEQ ID NO: 242, SEQ ID NO: 243, SEQ ID NO: 244, SEQ ID NO: 245, SEQ ID NO: 246, SEQ ID NO: 247, SEQ ID NO: 248, SEQ ID NO: 249, SEQ ID NO: 250, SEQ ID NO: 251, SEQ ID NO: 252, SEQ ID NO: 253, SEQ ID NO: 254, SEQ ID NO: 255, SEQ ID NO: 256, SEQ ID NO: 257, SEQ ID NO: 258, SEQ ID NO: 259, SEQ ID NO: 260, SEQ ID NO: 261, SEQ ID NO: 262, SEQ ID NO: 263, SEQ ID NO: 264, SEQ ID NO: 265, SEQ ID NO: 266, SEQ ID NO: 267, SEQ ID NO: 268, SEQ ID NO: 269, SEQ ID NO: 270, SEQ ID NO: 271, SEQ ID NO: 272, SEQ ID NO: 273, SEQ ID NO: 274, SEQ ID NO: 275, SEQ ID NO: 276, SEQ ID NO: 277, SEQ ID NO: 278, SEQ ID NO: 279, SEQ ID NO: 280, SEQ ID NO: 281, SEQ ID NO: 282, or SEQ ID NO: 283.

[0391] In some examples of any of the ABPCs described herein, the first antigen-binding domain includes a light chain variable domain comprising SEQ ID NO: 299, and a heavy chain variable domain comprising SEQ ID NO: 146, SEQ ID NO: 154, SEQ ID NO: 155, SEQ ID NO: 156, SEQ ID NO: 157, SEQ ID NO: 158, SEQ ID NO: 159, SEQ ID NO: 160, SEQ ID NO: 161, SEQ ID NO: 162, SEQ ID NO: 163, SEQ ID NO: 164, SEQ ID NO: 165, SEQ ID NO: 166, SEQ ID NO: 167, SEQ ID NO: 168, SEQ ID NO: 169, SEQ ID NO: 170, SEQ ID NO: 171, SEQ ID NO: 172, SEQ ID NO: 173, SEQ ID NO: 174, SEQ ID NO: 175, SEQ ID NO: 176, SEQ ID NO: 177, SEQ ID NO: 178, SEQ ID NO: 179, SEQ ID NO: 180, SEQ ID NO: 181, SEQ ID NO: 182, SEQ ID NO: 183, SEQ ID NO: 184, SEQ ID NO: 185, SEQ ID NO: 186, SEQ ID NO: 187, SEQ ID NO: 188, SEQ ID NO: 217, SEQ ID NO: 218, SEQ ID NO: 219, SEQ ID NO: 220, SEQ ID NO: 221, SEQ ID NO: 222, SEQ ID NO: 223, SEQ ID NO: 224, SEQ ID NO: 225, SEQ ID NO: 226, SEQ ID NO: 227, SEQ ID NO: 228, SEQ ID NO: 229, SEQ ID NO: 230, SEQ ID NO: 231, SEQ ID NO: 232, SEQ ID NO: 233, SEQ ID NO: 234, SEQ ID NO: 235, SEQ ID NO: 236, SEQ ID NO: 237, SEQ ID NO: 238, SEQ ID NO: 239, SEQ ID NO: 240, SEQ ID NO: 241, SEQ ID NO: 242, SEQ ID NO: 243, SEQ ID NO: 244, SEQ ID NO: 245, SEQ ID NO: 246, SEQ ID NO: 247, SEQ ID NO: 248, SEQ ID NO: 249, SEQ ID NO: 250, SEQ ID NO: 251, SEQ ID NO: 252, SEQ ID NO: 253, SEQ ID NO: 254, SEQ ID NO: 255, SEQ ID NO: 256, SEQ ID NO: 257, SEQ ID NO: 258, SEQ ID NO: 259, SEQ ID NO: 260, SEQ ID NO: 261, SEQ ID NO: 262, SEQ ID NO: 263, SEQ ID NO: 264, SEQ ID NO: 265, SEQ ID NO: 266, SEQ ID NO: 267, SEQ ID NO: 268, SEQ ID NO: 269, SEQ ID NO: 270, SEQ ID NO: 271, SEQ ID NO: 272, SEQ ID NO: 273, SEQ ID NO: 274, SEQ ID NO: 275, SEQ ID NO: 276, SEQ ID NO: 277, SEQ ID NO: 278, SEQ ID NO: 279, SEQ ID NO: 280, SEQ ID NO: 281, SEQ ID NO: 282, or SEQ ID NO: 283.

[0392] In some examples of any of the ABPCs described herein, the first antigen-binding domain includes a light chain variable domain comprising SEQ ID NO: 300, and a heavy chain variable domain comprising SEQ ID NO: 146, SEQ ID NO: 154, SEQ ID NO: 155, SEQ ID NO: 156, SEQ ID NO: 157, SEQ ID NO: 158, SEQ ID NO: 159, SEQ ID NO: 160, SEQ ID NO: 161, SEQ ID NO: 162, SEQ ID NO: 163, SEQ ID NO: 164, SEQ ID NO: 165, SEQ ID NO: 166, SEQ ID NO: 167, SEQ ID NO: 168, SEQ ID NO: 169, SEQ ID NO: 170, SEQ ID NO: 171, SEQ ID NO: 172, SEQ ID NO: 173, SEQ ID NO: 174, SEQ ID NO: 175, SEQ ID NO: 176, SEQ ID NO: 177, SEQ ID NO: 178, SEQ ID NO: 179, SEQ ID NO: 180, SEQ ID NO: 181, SEQ ID NO: 182, SEQ ID NO: 183, SEQ ID NO: 184, SEQ ID NO: 185, SEQ ID NO: 186, SEQ ID NO: 187, SEQ ID NO: 188, SEQ ID NO: 217, SEQ ID NO: 218, SEQ ID NO: 219, SEQ ID NO: 220, SEQ ID NO: 221, SEQ ID NO: 222, SEQ ID NO: 223, SEQ ID NO: 224, SEQ ID NO: 225, SEQ ID NO: 226, SEQ ID NO: 227, SEQ ID NO: 228, SEQ ID NO: 229, SEQ ID NO: 230, SEQ ID NO: 231, SEQ ID NO: 232, SEQ ID NO: 233, SEQ ID NO: 234, SEQ ID NO: 235, SEQ ID NO: 236, SEQ ID NO: 237, SEQ ID NO: 238, SEQ ID NO: 239, SEQ ID NO: 240, SEQ ID NO: 241, SEQ ID NO: 242, SEQ ID NO: 243, SEQ ID NO: 244, SEQ ID NO: 245, SEQ ID NO: 246, SEQ ID NO: 247, SEQ ID NO: 248, SEQ ID NO: 249, SEQ ID NO: 250, SEQ ID NO: 251, SEQ ID NO: 252, SEQ ID NO: 253, SEQ ID NO: 254, SEQ ID NO: 255, SEQ ID NO: 256, SEQ ID NO: 257, SEQ ID NO: 258, SEQ ID NO: 259, SEQ ID NO: 260, SEQ ID NO: 261, SEQ ID NO: 262, SEQ ID NO: 263, SEQ ID NO: 264, SEQ ID NO: 265, SEQ ID NO: 266, SEQ ID NO: 267, SEQ ID NO: 268, SEQ ID NO: 269, SEQ ID NO: 270, SEQ ID NO: 271, SEQ ID NO: 272, SEQ ID NO: 273, SEQ ID NO: 274, SEQ ID NO: 275, SEQ ID NO: 276, SEQ ID NO: 277, SEQ ID NO: 278, SEQ ID NO: 279, SEQ ID NO: 280, SEQ ID NO: 281, SEQ ID NO: 282, or SEQ ID NO: 283.

[0393] In some examples of any of the ABPCs described herein, the first antigen-binding domain includes a light chain variable domain comprising SEQ ID NO: 301, and a heavy chain variable domain comprising SEQ ID NO: 146, SEQ ID NO: 154, SEQ ID NO: 155, SEQ ID NO: 156, SEQ ID NO: 157, SEQ ID NO: 158, SEQ ID NO: 159, SEQ ID NO: 160, SEQ ID NO: 161, SEQ ID NO: 162, SEQ ID NO: 163, SEQ ID NO: 164, SEQ ID NO: 165, SEQ ID NO: 166, SEQ ID NO: 167, SEQ ID NO: 168, SEQ ID NO: 169, SEQ ID NO: 170, SEQ ID NO: 171, SEQ ID NO: 172, SEQ ID NO: 173, SEQ ID NO: 174, SEQ ID NO: 175, SEQ ID NO: 176, SEQ ID NO: 177, SEQ ID NO: 178, SEQ ID NO: 179, SEQ ID NO: 180, SEQ ID NO: 181, SEQ ID NO: 182, SEQ ID NO: 183, SEQ ID NO: 184, SEQ ID NO: 185, SEQ ID NO: 186, SEQ ID NO: 187, SEQ ID NO: 188, SEQ ID NO: 217, SEQ ID NO: 218, SEQ ID NO: 219, SEQ ID NO: 220, SEQ ID NO: 221, SEQ ID NO: 222, SEQ ID NO: 223, SEQ ID NO: 224, SEQ ID NO: 225, SEQ ID NO: 226, SEQ ID NO: 227, SEQ ID NO: 228, SEQ ID NO: 229, SEQ ID NO: 230, SEQ ID NO: 231, SEQ ID NO: 232, SEQ ID NO: 233, SEQ ID NO: 234, SEQ ID NO: 235, SEQ ID NO: 236, SEQ ID NO: 237, SEQ ID NO: 238, SEQ ID NO: 239, SEQ ID NO: 240, SEQ ID NO: 241, SEQ ID NO: 242, SEQ ID NO: 243, SEQ ID NO: 244, SEQ ID NO: 245, SEQ ID NO: 246, SEQ ID NO: 247, SEQ ID NO: 248, SEQ ID NO: 249, SEQ ID NO: 250, SEQ ID NO: 251, SEQ ID NO: 252, SEQ ID NO: 253, SEQ ID NO: 254, SEQ ID NO: 255, SEQ ID NO: 256, SEQ ID NO: 257, SEQ ID NO: 258, SEQ ID NO: 259, SEQ ID NO: 260, SEQ ID NO: 261, SEQ ID NO: 262, SEQ ID NO: 263, SEQ ID NO: 264, SEQ ID NO: 265, SEQ ID NO: 266, SEQ ID NO: 267, SEQ ID NO: 268, SEQ ID NO: 269, SEQ ID NO: 270, SEQ ID NO: 271, SEQ ID NO: 272, SEQ ID NO: 273, SEQ ID NO: 274, SEQ ID NO: 275, SEQ ID NO: 276, SEQ ID NO: 277, SEQ ID NO: 278, SEQ ID NO: 279, SEQ ID NO: 280, SEQ ID NO: 281, SEQ ID NO: 282, or SEQ ID NO: 283.

[0394] In some examples of any of the ABPCs described herein, the first antigen-binding domain includes a light chain variable domain comprising SEQ ID NO: 302, and a heavy chain variable domain comprising SEQ ID NO: 146, SEQ ID NO: 154, SEQ ID NO: 155, SEQ ID NO: 156, SEQ ID NO: 157, SEQ ID NO: 158, SEQ ID NO: 159, SEQ ID NO: 160, SEQ ID NO: 161, SEQ ID NO: 162, SEQ ID NO: 163, SEQ ID NO: 164, SEQ ID NO: 165, SEQ ID NO: 166, SEQ ID NO: 167, SEQ ID NO: 168, SEQ ID NO: 169, SEQ ID NO: 170, SEQ ID NO: 171, SEQ ID NO: 172, SEQ ID NO: 173, SEQ ID NO: 174, SEQ ID NO: 175, SEQ ID NO: 176, SEQ ID NO: 177, SEQ ID NO: 178, SEQ ID NO: 179, SEQ ID NO: 180, SEQ ID NO: 181, SEQ ID NO: 182, SEQ ID NO: 183, SEQ ID NO: 184, SEQ ID NO: 185, SEQ ID NO: 186, SEQ ID NO: 187, SEQ ID NO: 188, SEQ ID NO: 217, SEQ ID NO: 218, SEQ ID NO: 219, SEQ ID NO: 220, SEQ ID NO: 221, SEQ ID NO: 222, SEQ ID NO: 223, SEQ ID NO: 224, SEQ ID NO: 225, SEQ ID NO: 226, SEQ ID NO: 227, SEQ ID NO: 228, SEQ ID NO: 229, SEQ ID NO: 230, SEQ ID NO: 231, SEQ ID NO: 232, SEQ ID NO: 233, SEQ ID NO: 234, SEQ ID NO: 235, SEQ ID NO: 236, SEQ ID NO: 237, SEQ ID NO: 238, SEQ ID NO: 239, SEQ ID NO: 240, SEQ ID NO: 241, SEQ ID NO: 242, SEQ ID NO: 243, SEQ ID NO: 244, SEQ ID NO: 245, SEQ ID NO: 246, SEQ ID NO: 247, SEQ ID NO: 248, SEQ ID NO: 249, SEQ ID NO: 250, SEQ ID NO: 251, SEQ ID NO: 252, SEQ ID NO: 253, SEQ ID NO: 254, SEQ ID NO: 255, SEQ ID NO: 256, SEQ ID NO: 257, SEQ ID NO: 258, SEQ ID NO: 259, SEQ ID NO: 260, SEQ ID NO: 261, SEQ ID NO: 262, SEQ ID NO: 263, SEQ ID NO: 264, SEQ ID NO: 265, SEQ ID NO: 266, SEQ ID NO: 267, SEQ ID NO: 268, SEQ ID NO: 269, SEQ ID NO: 270, SEQ ID NO: 271, SEQ ID NO: 272, SEQ ID NO: 273, SEQ ID NO: 274, SEQ ID NO: 275, SEQ ID NO: 276, SEQ ID NO: 277, SEQ ID NO: 278, SEQ ID NO: 279, SEQ ID NO: 280, SEQ ID NO: 281, SEQ ID NO: 282, or SEQ ID NO: 283.

[0395] In some examples of any of the ABPCs described herein, the first antigen-binding domain includes a light chain variable domain comprising SEQ ID NO: 303, and a heavy chain variable domain comprising SEQ ID NO: 146, SEQ ID NO: 154, SEQ ID NO: 155, SEQ ID NO: 156, SEQ ID NO: 157, SEQ ID NO: 158, SEQ ID NO: 159, SEQ ID NO: 160, SEQ ID NO: 161, SEQ ID NO: 162, SEQ ID NO: 163, SEQ ID NO: 164, SEQ ID NO: 165, SEQ ID NO: 166, SEQ ID NO: 167, SEQ ID NO: 168, SEQ ID NO: 169, SEQ ID NO: 170, SEQ ID NO: 171, SEQ ID NO: 172, SEQ ID NO: 173, SEQ ID NO: 174, SEQ ID NO: 175, SEQ ID NO: 176, SEQ ID NO: 177, SEQ ID NO: 178, SEQ ID NO: 179, SEQ ID NO: 180, SEQ ID NO: 181, SEQ ID NO: 182, SEQ ID NO: 183, SEQ ID NO: 184, SEQ ID NO: 185, SEQ ID NO: 186, SEQ ID NO: 187, SEQ ID NO: 188, SEQ ID NO: 217, SEQ ID NO: 218, SEQ ID NO: 219, SEQ ID NO: 220, SEQ ID NO: 221, SEQ ID NO: 222, SEQ ID NO: 223, SEQ ID NO: 224, SEQ ID NO: 225, SEQ ID NO: 226, SEQ ID NO: 227, SEQ ID NO: 228, SEQ ID NO: 229, SEQ ID NO: 230, SEQ ID NO: 231, SEQ ID NO: 232, SEQ ID NO: 233, SEQ ID NO: 234, SEQ ID NO: 235, SEQ ID NO: 236, SEQ ID NO: 237, SEQ ID NO: 238, SEQ ID NO: 239, SEQ ID NO: 240, SEQ ID NO: 241, SEQ ID NO: 242, SEQ ID NO: 243, SEQ ID NO: 244, SEQ ID NO: 245, SEQ ID NO: 246, SEQ ID NO: 247, SEQ ID NO: 248, SEQ ID NO: 249, SEQ ID NO: 250, SEQ ID NO: 251, SEQ ID NO: 252, SEQ ID NO: 253, SEQ ID NO: 254, SEQ ID NO: 255, SEQ ID NO: 256, SEQ ID NO: 257, SEQ ID NO: 258, SEQ ID NO: 259, SEQ ID NO: 260, SEQ ID NO: 261, SEQ ID NO: 262, SEQ ID NO: 263, SEQ ID NO: 264, SEQ ID NO: 265, SEQ ID NO: 266, SEQ ID NO: 267, SEQ ID NO: 268, SEQ ID NO: 269, SEQ ID NO: 270, SEQ ID NO: 271, SEQ ID NO: 272, SEQ ID NO: 273, SEQ ID NO: 274, SEQ ID NO: 275, SEQ ID NO: 276, SEQ ID NO: 277, SEQ ID NO: 278, SEQ ID NO: 279, SEQ ID NO: 280, SEQ ID NO: 281, SEQ ID NO: 282, or SEQ ID NO: 283.

[0396] In some examples of any of the ABPCs described herein, the first antigen-binding domain includes a heavy chain variable domain of a hucMET27Gv1.3 with one or more (e.g., one, two, three, four, five, six, seven, eight, nine, ten, eleven, twelve, thirteen, fourteen, fifteen, sixteen, seventeen, eighteen, nineteen, or twenty) amino acids substituted with a histidine. In some examples of any of the ABPCs described herein, the first antigen-binding domain includes a light chain variable domain of hucMET27Gv1.3 with one or more (e.g., one, two, three, four, five, six, seven, eight, nine, ten, eleven, twelve, thirteen, fourteen, fifteen, sixteen, seventeen, eighteen, nineteen, or twenty) amino acids substituted with a histidine. In some examples of any of the ABPCs described herein, the first antigen-binding domain includes a heavy chain variable domain of hucMET27Gv1.3 with one or more (e.g., one, two, three, four, five, six, seven, eight, nine, ten, eleven, twelve, thirteen, fourteen, fifteen, sixteen, seventeen, eighteen, nineteen, or twenty) amino acids substituted with a histidine; and a light chain variable domain of hucMET27Gv1.3 with one or more (e.g., one, two, three, four, five, six, seven, eight, nine, ten, eleven, twelve, thirteen, fourteen, fifteen, sixteen, seventeen, eighteen, nineteen, or twenty) amino acids substituted with a histidine. In some examples of any of the ABPCs described herein, the heavy chain variable domain of hucMET27Gv1.3 comprises SEQ ID NO: 304. In some examples of any of the ABPCs described herein, the light chain variable domain of hucMET27Gv1.3 comprises SEQ ID NO: 305.

[0397] In some examples of any of the ABPCs described herein, the first antigen-binding domain comprises a heavy chain variable domain comprising a CDR1, a CDR2, and a CDR3 of SEQ ID NO: 306, SEQ ID NO: 307, and SEQ ID NO: 308, respectively, with collectively a total of one or more (e.g., one, two, three, four, five, six, seven, eight, nine, or ten) amino acid positions in SEQ ID NOs: 306-308 substituted with a histidine. In some examples of any of the ABPCs described herein, the first antigen-binding domain comprises a light chain variable domain comprising a CDR1, a CDR2, and a CDR3 of SEQ ID NO: 309, SEQ ID NO: 310, and SEQ ID NO: 311, respectively, with collectively a total of one or more (e.g., one, two, three, four, five, six, seven, eight, nine, or ten) amino acid positions in SEQ ID NOs: 309-311 substituted with a histidine. In some examples of any of the ABPCs described herein, the first antigen-binding domain includes: a heavy chain variable domain comprising a CDR1, a CDR2, and a CDR3 of SEQ ID NO: 306, SEQ ID NO: 307, and SEQ ID NO: 308, respectively, with collectively a total of one or more (e.g., one, two, three, four, five, six, seven, eight, nine, or ten) amino acid positions in SEQ ID NOs: 306-308 substituted with a histidine; and a light chain variable domain comprising a CDR1, a CDR2, and a CDR3 of SEQ ID NO: 309, SEQ ID NO: 310, and SEQ ID NO: 311, respectively, with collectively a total of one or more (e.g., one, two, three, four, five, six, seven, eight, nine, or ten) amino acid positions in SEQ ID NOs: 309-311 substituted with a histidine.

[0398] In some examples of any of the ABPCs described herein, the first antigen-binding domain includes a heavy chain variable domain that is at least 90% (e.g., at least 92%, at least 94%, at least 96%, at least 98%, at least 99%, or 100%) identical to SEQ ID NO: 304, where the heavy chain variable domain includes a histidine at one or more (e.g., one, two, three, four, five, six, seven, eight, nine, ten, eleven, twelve, thirteen, fourteen, fifteen, sixteen, seventeen, eighteen, nineteen, or twenty) amino acid positions in SEQ ID NO: 304 selected from the group consisting of: 27, 34, 35, 50, 51, 52, 54, 55, 56, 57, 58, 59, 60, 61, 62, 63, 64, 65, 98, 99, 103, and 105. In some examples of any of the ABPCs described herein, the first antigen-binding domain includes a light chain variable domain that is at least 90% (e.g., at least 92%, at least 94%, at least 96%, at least 98%, at least 99%, or 100%) identical to SEQ ID NO: 305, where the light chain variable domain includes a histidine at one or more (e.g., one, two, three, four, five, six, seven, eight, nine, ten, eleven, twelve, thirteen, fourteen, fifteen, sixteen, seventeen, eighteen, nineteen, or twenty) amino acid positions in SEQ ID NO: 305 selected from the group consisting of: 26, 30, 31, 34, 36, 54, 56, 57, 60, 93, 95, 99, and 101. In some examples of any of the ABPCs described herein the first antigen-binding domain includes: a heavy chain variable domain that is at least 90% (e.g., at least 92%, at least 94%, at least 96%, at least 98%, at least 99%, or 100%) identical to SEQ ID NO: 304, where the heavy chain variable domain includes a histidine at one or more (e.g., one, two, three, four, five, six, seven, eight, nine, ten, eleven, twelve, thirteen, fourteen, fifteen, sixteen, seventeen, eighteen, nineteen, or twenty) amino acid positions in SEQ ID NO: 304 selected from the group consisting of: 27, 34, 35, 50, 51, 52, 54, 55, 56, 57, 58, 59, 60, 61, 62, 63, 64, 65, 98, 99, 103, and 105, and a light chain variable domain that is at least 90% (e.g., at least 92%, at least 94%, at least 96%, at least 98%, at least 99%, or 100%) identical to SEQ ID NO: 305, where the light chain variable domain includes a histidine at one or more (e.g., one, two, three, four, five, six, seven, eight, nine, ten, eleven, twelve, thirteen, fourteen, fifteen, sixteen, seventeen, eighteen, nineteen, or twenty) amino acid positions in SEQ ID NO: 305 selected from the group consisting of: 26, 30, 31, 34, 36, 54, 56, 57, 60, 93, 95, 99, and 101.

[0399] In some examples of any of the ABPCs described herein, a heavy chain variable domain includes a heavy chain variable domain that is at least 90% (e.g., at least 92%, at least 94%, at least 96%, at least 98%, at least 99%, or 100%) identical to SEQ ID NO: 304, where the heavy chain variable domain includes a histidine at any of the specific combinations of one or more amino acid positions in SEQ ID NO: 304 listed in Table 5.

TABLE 5
Exemplary Combinations of Amino Acid Positions in SEQ
ID NO: 304 that can be Substituted with Histidine

27 + 34, 27 + 35, 27 + 50, 27 + 51, 27 + 52, 27 + 54, 27 + 55, 27 + 56, 27 + 57, 27 + 58, 27 +
59, 27 + 60, 27 + 61, 27 + 62, 27 + 63, 27 + 64, 27 + 65, 27 + 98, 27 + 99, 27 + 103, 27 +
105, 34 + 35, 34 + 50, 34 + 51, 34 + 52, 34 + 54, 34 + 55, 34 + 56, 34 + 57, 34 + 58, 34 +
59, 34 + 60, 34 + 61, 34 + 62, 34 + 63, 34 + 64, 34 + 65, 34 + 98, 34 + 99, 34 + 103, 34 +
105, 35 + 50, 35 + 51, 35 + 52, 35 + 54, 35 + 55, 35 + 56, 35 + 57, 35 + 58, 35 + 59, 35 +
60, 35 + 61, 35 + 62, 35 + 63, 35 + 64, 35 + 65, 35 + 98, 35 + 99, 35 + 103, 35 + 105, 50 +
51, 50 + 52, 50 + 54, 50 + 55, 50 + 56, 50 + 57, 50 + 58, 50 + 59, 50 + 60, 50 + 61, 50 +
62, 50 + 63, 50 + 64, 50 + 65, 50 + 98, 50 + 99, 50 + 103, 50 + 105, 51 + 52, 51 + 54, 51 +
55, 51 + 56, 51 + 57, 51 + 58, 51 + 59, 51 + 60, 51 + 61, 51 + 62, 51 + 63, 51 + 64, 51 +
65, 51 + 98, 51 + 99, 51 + 103, 51 + 105, 52 + 54, 52 + 55, 52 + 56, 52 + 57, 52 + 58, 52 +
59, 52 + 60, 52 + 61, 52 + 62, 52 + 63, 52 + 64, 52 + 65, 52 + 98, 52 + 99, 52 + 103, 52 +
105, 54 + 55, 54 + 56, 54 + 57, 54 + 58, 54 + 59, 54 + 60, 54 + 61, 54 + 62, 54 + 63, 54 +
64, 54 + 65, 54 + 98, 54 + 99, 54 + 103, 54 + 105, 55 + 56, 55 + 57, 55 + 58, 55 + 59, 55 +
60, 55 + 61, 55 + 62, 55 + 63, 55 + 64, 55 + 65, 55 + 98, 55 + 99, 55 + 103, 55 + 105, 56 +
57, 56 + 58, 56 + 59, 56 + 60, 56 + 61, 56 + 62, 56 + 63, 56 + 64, 56 + 65, 56 + 98, 56 +
99, 56 + 103, 56 + 105, 57 + 58, 57 + 59, 57 + 60, 57 + 61, 57 + 62, 57 + 63, 57 + 64, 57 +
65, 57 + 98, 57 + 99, 57 + 103, 57 + 105, 58 + 59, 58 + 60, 58 + 61, 58 + 62, 58 + 63, 58 +
64, 58 + 65, 58 + 98, 58 + 99, 58 + 103, 58 + 105, 59 + 60, 59 + 61, 59 + 62, 59 + 63, 59 +
64, 59 + 65, 59 + 98, 59 + 99, 59 + 103, 59 + 105, 60 + 61, 60 + 62, 60 + 63, 60 + 64, 60 +
65, 60 + 98, 60 + 99, 60 + 103, 60 + 105, 61 + 62, 61 + 63, 61 + 64, 61 + 65, 61 + 98, 61 +
99, 61 + 103, 61 + 105, 62 + 63, 62 + 64, 62 + 65, 62 + 98, 62 + 99, 62 + 103, 62 + 105, 63 +
64, 63 + 65, 63 + 98, 63 + 99, 63 + 103, 63 + 105, 64 + 65, 64 + 98, 64 + 99, 64 + 103,
64 + 105, 65 + 98, 65 + 99, 65 + 103, 65 + 105, 98 + 99, 98 + 103, 98 + 105, 99 + 103, 99 +
105, 103 + 105, 27 + 34 + 35, 27 + 34 + 50, 27 + 34 + 51, 27 + 34 + 52, 27 + 34 + 54,
27 + 34 + 55, 27 + 34 + 56, 27 + 34 + 57, 27 + 34 + 58, 27 + 34 + 59, 27 + 34 + 60, 27 +
34 + 61, 27 + 34 + 62, 27 + 34 + 63, 27 + 34 + 64, 27 + 34 + 65, 27 + 34 + 98, 27 + 34 +
99, 27 + 34 + 103, 27 + 34 + 105, 27 + 35 + 50, 27 + 35 + 51, 27 + 35 + 52, 27 + 35 + 54,
27 + 35 + 55, 27 + 35 + 56, 27 + 35 + 57, 27 + 35 + 58, 27 + 35 + 59, 27 + 35 + 60, 27 +
35 + 61, 27 + 35 + 62, 27 + 35 + 63, 27 + 35 + 64, 27 + 35 + 65, 27 + 35 + 98, 27 + 35 +
99, 27 + 35 + 103, 27 + 35 + 105, 27 + 50 + 51, 27 + 50 + 52, 27 + 50 + 54, 27 + 50 + 55,
27 + 50 + 56, 27 + 50 + 57, 27 + 50 + 58, 27 + 50 + 59, 27 + 50 + 60, 27 + 50 + 61, 27 +
50 + 62, 27 + 50 + 63, 27 + 50 + 64, 27 + 50 + 65, 27 + 50 + 98, 27 + 50 + 99, 27 + 50 +
103, 27 + 50 + 105, 27 + 51 + 52, 27 + 51 + 54, 27 + 51 + 55, 27 + 51 + 56, 27 + 51 + 57,
27 + 51 + 58, 27 + 51 + 59, 27 + 51 + 60, 27 + 51 + 61, 27 + 51 + 62, 27 + 51 + 63, 27 +
51 + 64, 27 + 51 + 65, 27 + 51 + 98, 27 + 51 + 99, 27 + 51 + 103, 27 + 51 + 105, 27 + 52 +
54, 27 + 52 + 55, 27 + 52 + 56, 27 + 52 + 57, 27 + 52 + 58, 27 + 52 + 59, 27 + 52 + 60, 27 +
52 + 61, 27 + 52 + 62, 27 + 52 + 63, 27 + 52 + 64, 27 + 52 + 65, 27 + 52 + 98, 27 + 52 +
99, 27 + 52 + 103, 27 + 52 + 105, 27 + 54 + 55, 27 + 54 + 56, 27 + 54 + 57, 27 + 54 + 58,
27 + 54 + 59, 27 + 54 + 60, 27 + 54 + 61, 27 + 54 + 62, 27 + 54 + 63, 27 + 54 + 64, 27 +
54 + 65, 27 + 54 + 98, 27 + 54 + 99, 27 + 54 + 103, 27 + 54 + 105, 27 + 55 + 56, 27 + 55 +
57, 27 + 55 + 58, 27 + 55 + 59, 27 + 55 + 60, 27 + 55 + 61, 27 + 55 + 62, 27 + 55 + 63, 27 +
55 + 64, 27 + 55 + 65, 27 + 55 + 98, 27 + 55 + 99, 27 + 55 + 103, 27 + 55 + 105, 27 + 56 +
57, 27 + 56 + 58, 27 + 56 + 59, 27 + 56 + 60, 27 + 56 + 61, 27 + 56 + 62, 27 + 56 + 63,
27 + 56 + 64, 27 + 56 + 65, 27 + 56 + 98, 27 + 56 + 99, 27 + 56 + 103, 27 + 56 + 105, 27 +
57 + 58, 27 + 57 + 59, 27 + 57 + 60, 27 + 57 + 61, 27 + 57 + 62, 27 + 57 + 63, 27 + 57 +
64, 27 + 57 + 65, 27 + 57 + 98, 27 + 57 + 99, 27 + 57 + 103, 27 + 57 + 105, 27 + 58 + 59,
27 + 58 + 60, 27 + 58 + 61, 27 + 58 + 62, 27 + 58 + 63, 27 + 58 + 64, 27 + 58 + 65, 27 +
58 + 98, 27 + 58 + 99, 27 + 58 + 103, 27 + 58 + 105, 27 + 59 + 60, 27 + 59 + 61, 27 + 59 +
62, 27 + 59 + 63, 27 + 59 + 64, 27 + 59 + 65, 27 + 59 + 98, 27 + 59 + 99, 27 + 59 + 103,
27 + 59 + 105, 27 + 60 + 61, 27 + 60 + 62, 27 + 60 + 63, 27 + 60 + 64, 27 + 60 + 65, 27 +
60 + 98, 27 + 60 + 99, 27 + 60 + 103, 27 + 60 + 105, 27 + 61 + 62, 27 + 61 + 63, 27 + 61 +
64, 27 + 61 + 65, 27 + 61 + 98, 27 + 61 + 99, 27 + 61 + 103, 27 + 61 + 105, 27 + 62 + 63,
27 + 62 + 64, 27 + 62 + 65, 27 + 62 + 98, 27 + 62 + 99, 27 + 62 + 103, 27 + 62 + 105, 27 +
63 + 64, 27 + 63 + 65, 27 + 63 + 98, 27 + 63 + 99, 27 + 63 + 103, 27 + 63 + 105, 27 + 64 +
65, 27 + 64 + 98, 27 + 64 + 99, 27 + 64 + 103, 27 + 64 + 105, 27 + 65 + 98, 27 + 65 + 99,
27 + 65 + 103, 27 + 65 + 105, 27 + 98 + 99, 27 + 98 + 103, 27 + 98 + 105, 27 + 99 + 103,
27 + 99 + 105, 27 + 103 + 105, 34 + 35 + 50, 34 + 35 + 51, 34 + 35 + 52, 34 + 35 + 54, 34 +
35 + 55, 34 + 35 + 56, 34 + 35 + 57, 34 + 35 + 58, 34 + 35 + 59, 34 + 35 + 60, 34 + 35 +
61, 34 + 35 + 62, 34 + 35 + 63, 34 + 35 + 64, 34 + 35 + 65, 34 + 35 + 98, 34 + 35 + 99, 34 +
35 + 103, 34 + 35 + 105, 34 + 50 + 51, 34 + 50 + 52, 34 + 50 + 54, 34 + 50 + 55, 34 + 50 +
56, 34 + 50 + 57, 34 + 50 + 58, 34 + 50 + 59, 34 + 50 + 60, 34 + 50 + 61, 34 + 50 + 62,
34 + 50 + 63, 34 + 50 + 64, 34 + 50 + 65, 34 + 50 + 98, 34 + 50 + 99, 34 + 50 + 103, 34 +
50 + 105, 34 + 51 + 52, 34 + 51 + 54, 34 + 51 + 55, 34 + 51 + 56, 34 + 51 + 57, 34 + 51 +
58, 34 + 51 + 59, 34 + 51 + 60, 34 + 51 + 61, 34 + 51 + 62, 34 + 51 + 63, 34 + 51 + 64, 34 +
51 + 65, 34 + 51 + 98, 34 + 51 + 99, 34 + 51 + 103, 34 + 51 + 105, 34 + 52 + 54, 34 + 52 +
55, 34 + 52 + 56, 34 + 52 + 57, 34 + 52 + 58, 34 + 52 + 59, 34 + 52 + 60, 34 + 52 + 61,
34 + 52 + 62, 34 + 52 + 63, 34 + 52 + 64, 34 + 52 + 65, 34 + 52 + 98, 34 + 52 + 99, 34 +
52 + 103, 34 + 52 + 105, 34 + 54 + 55, 34 + 54 + 56, 34 + 54 + 57, 34 + 54 + 58, 34 + 54 +
59, 34 + 54 + 60, 34 + 54 + 61, 34 + 54 + 62, 34 + 54 + 63, 34 + 54 + 64, 34 + 54 + 65, 34 +
54 + 98, 34 + 54 + 99, 34 + 54 + 103, 34 + 54 + 105, 34 + 55 + 56, 34 + 55 + 57, 34 + 55 +
58, 34 + 55 + 59, 34 + 55 + 60, 34 + 55 + 61, 34 + 55 + 62, 34 + 55 + 63, 34 + 55 + 64,
34 + 55 + 65, 34 + 55 + 98, 34 + 55 + 99, 34 + 55 + 103, 34 + 55 + 105, 34 + 56 + 57, 34 +
56 + 58, 34 + 56 + 59, 34 + 56 + 60, 34 + 56 + 61, 34 + 56 + 62, 34 + 56 + 63, 34 + 56 +
64, 34 + 56 + 65, 34 + 56 + 98, 34 + 56 + 99, 34 + 56 + 103, 34 + 56 + 105, 34 + 57 + 58,
34 + 57 + 59, 34 + 57 + 60, 34 + 57 + 61, 34 + 57 + 62, 34 + 57 + 63, 34 + 57 + 64, 34 +
57 + 65, 34 + 57 + 98, 34 + 57 + 99, 34 + 57 + 103, 34 + 57 + 105, 34 + 58 + 59, 34 + 58 +
60, 34 + 58 + 61, 34 + 58 + 62, 34 + 58 + 63, 34 + 58 + 64, 34 + 58 + 65, 34 + 58 + 98, 34 +
58 + 99, 34 + 58 + 103, 34 + 58 + 105, 34 + 59 + 60, 34 + 59 + 61, 34 + 59 + 62, 34 + 59 +
63, 34 + 59 + 64, 34 + 59 + 65, 34 + 59 + 98, 34 + 59 + 99, 34 + 59 + 103, 34 + 59 +
105, 34 + 60 + 61, 34 + 60 + 62, 34 + 60 + 63, 34 + 60 + 64, 34 + 60 + 65, 34 + 60 + 98,
34 + 60 + 99, 34 + 60 + 103, 34 + 60 + 105, 34 + 61 + 62, 34 + 61 + 63, 34 + 61 + 64, 34 +
61 + 65, 34 + 61 + 98, 34 + 61 + 99, 34 + 61 + 103, 34 + 61 + 105, 34 + 62 + 63, 34 + 62 +
64, 34 + 62 + 65, 34 + 62 + 98, 34 + 62 + 99, 34 + 62 + 103, 34 + 62 + 105, 34 + 63 + 64,
34 + 63 + 65, 34 + 63 + 98, 34 + 63 + 99, 34 + 63 + 103, 34 + 63 + 105, 34 + 64 + 65, 34 +
64 + 98, 34 + 64 + 99, 34 + 64 + 103, 34 + 64 + 105, 34 + 65 + 98, 34 + 65 + 99, 34 + 65 +
103, 34 + 65 + 105, 34 + 98 + 99, 34 + 98 + 103, 34 + 98 + 105, 34 + 99 + 103, 34 + 99 +
105, 34 + 103 + 105, 35 + 50 + 51, 35 + 50 + 52, 35 + 50 + 54, 35 + 50 + 55, 35 + 50 + 56,
35 + 50 + 57, 35 + 50 + 58, 35 + 50 + 59, 35 + 50 + 60, 35 + 50 + 61, 35 + 50 + 62, 35 +
50 + 63, 35 + 50 + 64, 35 + 50 + 65, 35 + 50 + 98, 35 + 50 + 99, 35 + 50 + 103, 35 + 50 +
105, 35 + 51 + 52, 35 + 51 + 54, 35 + 51 + 55, 35 + 51 + 56, 35 + 51 + 57, 35 + 51 + 58,
35 + 51 + 59, 35 + 51 + 60, 35 + 51 + 61, 35 + 51 + 62, 35 + 51 + 63, 35 + 51 + 64, 35 +
51 + 65, 35 + 51 + 98, 35 + 51 + 99, 35 + 51 + 103, 35 + 51 + 105, 35 + 52 + 54, 35 + 52 +
55, 35 + 52 + 56, 35 + 52 + 57, 35 + 52 + 58, 35 + 52 + 59, 35 + 52 + 60, 35 + 52 + 61, 35 +
52 + 62, 35 + 52 + 63, 35 + 52 + 64, 35 + 52 + 65, 35 + 52 + 98, 35 + 52 + 99, 35 + 52 +
103, 35 + 52 + 105, 35 + 54 + 55, 35 + 54 + 56, 35 + 54 + 57, 35 + 54 + 58, 35 + 54 + 59,
35 + 54 + 60, 35 + 54 + 61, 35 + 54 + 62, 35 + 54 + 63, 35 + 54 + 64, 35 + 54 + 65, 35 +
54 + 98, 35 + 54 + 99, 35 + 54 + 103, 35 + 54 + 105, 35 + 55 + 56, 35 + 55 + 57, 35 + 55 +
58, 35 + 55 + 59, 35 + 55 + 60, 35 + 55 + 61, 35 + 55 + 62, 35 + 55 + 63, 35 + 55 + 64, 35 +
55 + 65, 35 + 55 + 98, 35 + 55 + 99, 35 + 55 + 103, 35 + 55 + 105, 35 + 56 + 57, 35 + 56 +
58, 35 + 56 + 59, 35 + 56 + 60, 35 + 56 + 61, 35 + 56 + 62, 35 + 56 + 63, 35 + 56 + 64,
35 + 56 + 65, 35 + 56 + 98, 35 + 56 + 99, 35 + 56 + 103, 35 + 56 + 105, 35 + 57 + 58, 35 +
57 + 59, 35 + 57 + 60, 35 + 57 + 61, 35 + 57 + 62, 35 + 57 + 63, 35 + 57 + 64, 35 + 57 +
65, 35 + 57 + 98, 35 + 57 + 99, 35 + 57 + 103, 35 + 57 + 105, 35 + 58 + 59, 35 + 58 + 60,
35 + 58 + 61, 35 + 58 + 62, 35 + 58 + 63, 35 + 58 + 64, 35 + 58 + 65, 35 + 58 + 98, 35 +
58 + 99, 35 + 58 + 103, 35 + 58 + 105, 35 + 59 + 60, 35 + 59 + 61, 35 + 59 + 62, 35 + 59 +
63, 35 + 59 + 64, 35 + 59 + 65, 35 + 59 + 98, 35 + 59 + 99, 35 + 59 + 103, 35 + 59 + 105,
35 + 60 + 61, 35 + 60 + 62, 35 + 60 + 63, 35 + 60 + 64, 35 + 60 + 65, 35 + 60 + 98, 35 +
60 + 99, 35 + 60 + 103, 35 + 60 + 105, 35 + 61 + 62, 35 + 61 + 63, 35 + 61 + 64, 35 + 61 +
65, 35 + 61 + 98, 35 + 61 + 99, 35 + 61 + 103, 35 + 61 + 105, 35 + 62 + 63, 35 + 62 + 64,
35 + 62 + 65, 35 + 62 + 98, 35 + 62 + 99, 35 + 62 + 103, 35 + 62 + 105, 35 + 63 + 64, 35 +
63 + 65, 35 + 63 + 98, 35 + 63 + 99, 35 + 63 + 103, 35 + 63 + 105, 35 + 64 + 65, 35 + 64 +
98, 35 + 64 + 99, 35 + 64 + 103, 35 + 64 + 105, 35 + 65 + 98, 35 + 65 + 99, 35 + 65 + 103,
35 + 65 + 105, 35 + 98 + 99, 35 + 98 + 103, 35 + 98 + 105, 35 + 99 + 103, 35 + 99 + 105,
35 + 103 + 105, 50 + 51 + 52, 50 + 51 + 54, 50 + 51 + 55, 50 + 51 + 56, 50 + 51 + 57, 50 +
51 + 58, 50 + 51 + 59, 50 + 51 + 60, 50 + 51 + 61, 50 + 51 + 62, 50 + 51 + 63, 50 + 51 +
64, 50 + 51 + 65, 50 + 51 + 98, 50 + 51 + 99, 50 + 51 + 103, 50 + 51 + 105, 50 + 52 + 54,
50 + 52 + 55, 50 + 52 + 56, 50 + 52 + 57, 50 + 52 + 58, 50 + 52 + 59, 50 + 52 + 60, 50 +
52 + 61, 50 + 52 + 62, 50 + 52 + 63, 50 + 52 + 64, 50 + 52 + 65, 50 + 52 + 98, 50 + 52 +
99, 50 + 52 + 103, 50 + 52 + 105, 50 + 54 + 55, 50 + 54 + 56, 50 + 54 + 57, 50 + 54 + 58,
50 + 54 + 59, 50 + 54 + 60, 50 + 54 + 61, 50 + 54 + 62, 50 + 54 + 63, 50 + 54 + 64, 50 +
54 + 65, 50 + 54 + 98, 50 + 54 + 99, 50 + 54 + 103, 50 + 54 + 105, 50 + 55 + 56, 50 + 55 +
57, 50 + 55 + 58, 50 + 55 + 59, 50 + 55 + 60, 50 + 55 + 61, 50 + 55 + 62, 50 + 55 + 63, 50 +
55 + 64, 50 + 55 + 65, 50 + 55 + 98, 50 + 55 + 99, 50 + 55 + 103, 50 + 55 + 105, 50 + 56 +
57, 50 + 56 + 58, 50 + 56 + 59, 50 + 56 + 60, 50 + 56 + 61, 50 + 56 + 62, 50 + 56 + 63,
50 + 56 + 64, 50 + 56 + 65, 50 + 56 + 98, 50 + 56 + 99, 50 + 56 + 103, 50 + 56 + 105, 50 +
57 + 58, 50 + 57 + 59, 50 + 57 + 60, 50 + 57 + 61, 50 + 57 + 62, 50 + 57 + 63, 50 + 57 +
64, 50 + 57 + 65, 50 + 57 + 98, 50 + 57 + 99, 50 + 57 + 103, 50 + 57 + 105, 50 + 58 + 59,
50 + 58 + 60, 50 + 58 + 61, 50 + 58 + 62, 50 + 58 + 63, 50 + 58 + 64, 50 + 58 + 65, 50 +
58 + 98, 50 + 58 + 99, 50 + 58 + 103, 50 + 58 + 105, 50 + 59 + 60, 50 + 59 + 61, 50 + 59 +
62, 50 + 59 + 63, 50 + 59 + 64, 50 + 59 + 65, 50 + 59 + 98, 50 + 59 + 99, 50 + 59 + 103,
50 + 59 + 105, 50 + 60 + 61, 50 + 60 + 62, 50 + 60 + 63, 50 + 60 + 64, 50 + 60 + 65, 50 +
60 + 98, 50 + 60 + 99, 50 + 60 + 103, 50 + 60 + 105, 50 + 61 + 62, 50 + 61 + 63, 50 + 61 +
64, 50 + 61 + 65, 50 + 61 + 98, 50 + 61 + 99, 50 + 61 + 103, 50 + 61 + 105, 50 + 62 + 63,
50 + 62 + 64, 50 + 62 + 65, 50 + 62 + 98, 50 + 62 + 99, 50 + 62 + 103, 50 + 62 + 105, 50 +
63 + 64, 50 + 63 + 65, 50 + 63 + 98, 50 + 63 + 99, 50 + 63 + 103, 50 + 63 + 105, 50 + 64 +
65, 50 + 64 + 98, 50 + 64 + 99, 50 + 64 + 103, 50 + 64 + 105, 50 + 65 + 98, 50 + 65 + 99,
50 + 65 + 103, 50 + 65 + 105, 50 + 98 + 99, 50 + 98 + 103, 50 + 98 + 105, 50 + 99 + 103,
50 + 99 + 105, 50 + 103 + 105, 51 + 52 + 54, 51 + 52 + 55, 51 + 52 + 56, 51 + 52 + 57, 51 +
52 + 58, 51 + 52 + 59, 51 + 52 + 60, 51 + 52 + 61, 51 + 52 + 62, 51 + 52 + 63, 51 + 52 +
64, 51 + 52 + 65, 51 + 52 + 98, 51 + 52 + 99, 51 + 52 + 103, 51 + 52 + 105, 51 + 54 + 55,
51 + 54 + 56, 51 + 54 + 57, 51 + 54 + 58, 51 + 54 + 59, 51 + 54 + 60, 51 + 54 + 61, 51 +
54 + 62, 51 + 54 + 63, 51 + 54 + 64, 51 + 54 + 65, 51 + 54 + 98, 51 + 54 + 99, 51 + 54 +
103, 51 + 54 + 105, 51 + 55 + 56, 51 + 55 + 57, 51 + 55 + 58, 51 + 55 + 59, 51 + 55 + 60,
51 + 55 + 61, 51 + 55 + 62, 51 + 55 + 63, 51 + 55 + 64, 51 + 55 + 65, 51 + 55 + 98, 51 +
55 + 99, 51 + 55 + 103, 51 + 55 + 105, 51 + 56 + 57, 51 + 56 + 58, 51 + 56 + 59, 51 + 56 +
60, 51 + 56 + 61, 51 + 56 + 62, 51 + 56 + 63, 51 + 56 + 64, 51 + 56 + 65, 51 + 56 + 98, 51 +
56 + 99, 51 + 56 + 103, 51 + 56 + 105, 51 + 57 + 58, 51 + 57 + 59, 51 + 57 + 60, 51 + 57 +
61, 51 + 57 + 62, 51 + 57 + 63, 51 + 57 + 64, 51 + 57 + 65, 51 + 57 + 98, 51 + 57 + 99,
51 + 57 + 103, 51 + 57 + 105, 51 + 58 + 59, 51 + 58 + 60, 51 + 58 + 61, 51 + 58 + 62, 51 +
58 + 63, 51 + 58 + 64, 51 + 58 + 65, 51 + 58 + 98, 51 + 58 + 99, 51 + 58 + 103, 51 + 58 +
105, 51 + 59 + 60, 51 + 59 + 61, 51 + 59 + 62, 51 + 59 + 63, 51 + 59 + 64, 51 + 59 + 65,
51 + 59 + 98, 51 + 59 + 99, 51 + 59 + 103, 51 + 59 + 105, 51 + 60 + 61, 51 + 60 + 62, 51 +
60 + 63, 51 + 60 + 64, 51 + 60 + 65, 51 + 60 + 98, 51 + 60 + 99, 51 + 60 + 103, 51 + 60 +
105, 51 + 61 + 62, 51 + 61 + 63, 51 + 61 + 64, 51 + 61 + 65, 51 + 61 + 98, 51 + 61 + 99,
51 + 61 + 103, 51 + 61 + 105, 51 + 62 + 63, 51 + 62 + 64, 51 + 62 + 65, 51 + 62 + 98, 51 +
62 + 99, 51 + 62 + 103, 51 + 62 + 105, 51 + 63 + 64, 51 + 63 + 65, 51 + 63 + 98, 51 + 63 +
99, 51 + 63 + 103, 51 + 63 + 105, 51 + 64 + 65, 51 + 64 + 98, 51 + 64 + 99, 51 + 64 + 103,
51 + 64 + 105, 51 + 65 + 98, 51 + 65 + 99, 51 + 65 + 103, 51 + 65 + 105, 51 + 98 + 99, 51 +
98 + 103, 51 + 98 + 105, 51 + 99 + 103, 51 + 99 + 105, 51 + 103 + 105, 52 + 54 + 55, 52 +
54 + 56, 52 + 54 + 57, 52 + 54 + 58, 52 + 54 + 59, 52 + 54 + 60, 52 + 54 + 61, 52 + 54 +
62, 52 + 54 + 63, 52 + 54 + 64, 52 + 54 + 65, 52 + 54 + 98, 52 + 54 + 99, 52 + 54 + 103,
52 + 54 + 105, 52 + 55 + 56, 52 + 55 + 57, 52 + 55 + 58, 52 + 55 + 59, 52 + 55 + 60, 52 +
55 + 61, 52 + 55 + 62, 52 + 55 + 63, 52 + 55 + 64, 52 + 55 + 65, 52 + 55 + 98, 52 + 55 +
99, 52 + 55 + 103, 52 + 55 + 105, 52 + 56 + 57, 52 + 56 + 58, 52 + 56 + 59, 52 + 56 + 60,
52 + 56 + 61, 52 + 56 + 62, 52 + 56 + 63, 52 + 56 + 64, 52 + 56 + 65, 52 + 56 + 98, 52 +
56 + 99, 52 + 56 + 103, 52 + 56 + 105, 52 + 57 + 58, 52 + 57 + 59, 52 + 57 + 60, 52 + 57 +
61, 52 + 57 + 62, 52 + 57 + 63, 52 + 57 + 64, 52 + 57 + 65, 52 + 57 + 98, 52 + 57 + 99, 52 +
57 + 103, 52 + 57 + 105, 52 + 58 + 59, 52 + 58 + 60, 52 + 58 + 61, 52 + 58 + 62, 52 + 58 +
63, 52 + 58 + 64, 52 + 58 + 65, 52 + 58 + 98, 52 + 58 + 99, 52 + 58 + 103, 52 + 58 +
105, 52 + 59 + 60, 52 + 59 + 61, 52 + 59 + 62, 52 + 59 + 63, 52 + 59 + 64, 52 + 59 + 65,
52 + 59 + 98, 52 + 59 + 99, 52 + 59 + 103, 52 + 59 + 105, 52 + 60 + 61, 52 + 60 + 62, 52 +
60 + 63, 52 + 60 + 64, 52 + 60 + 65, 52 + 60 + 98, 52 + 60 + 99, 52 + 60 + 103, 52 + 60 +
105, 52 + 61 + 62, 52 + 61 + 63, 52 + 61 + 64, 52 + 61 + 65, 52 + 61 + 98, 52 + 61 + 99,
52 + 61 + 103, 52 + 61 + 105, 52 + 62 + 63, 52 + 62 + 64, 52 + 62 + 65, 52 + 62 + 98, 52 +
62 + 99, 52 + 62 + 103, 52 + 62 + 105, 52 + 63 + 64, 52 + 63 + 65, 52 + 63 + 98, 52 + 63 +
99, 52 + 63 + 103, 52 + 63 + 105, 52 + 64 + 65, 52 + 64 + 98, 52 + 64 + 99, 52 + 64 + 103,
52 + 64 + 105, 52 + 65 + 98, 52 + 65 + 99, 52 + 65 + 103, 52 + 65 + 105, 52 + 98 + 99, 52 +
98 + 103, 52 + 98 + 105, 52 + 99 + 103, 52 + 99 + 105, 52 + 103 + 105, 54 + 55 + 56, 54 +
55 + 57, 54 + 55 + 58, 54 + 55 + 59, 54 + 55 + 60, 54 + 55 + 61, 54 + 55 + 62, 54 + 55 +
63, 54 + 55 + 64, 54 + 55 + 65, 54 + 55 + 98, 54 + 55 + 99, 54 + 55 + 103, 54 + 55 + 105,
54 + 56 + 57, 54 + 56 + 58, 54 + 56 + 59, 54 + 56 + 60, 54 + 56 + 61, 54 + 56 + 62, 54 +
56 + 63, 54 + 56 + 64, 54 + 56 + 65, 54 + 56 + 98, 54 + 56 + 99, 54 + 56 + 103, 54 + 56 +
105, 54 + 57 + 58, 54 + 57 + 59, 54 + 57 + 60, 54 + 57 + 61, 54 + 57 + 62, 54 + 57 + 63,
54 + 57 + 64, 54 + 57 + 65, 54 + 57 + 98, 54 + 57 + 99, 54 + 57 + 103, 54 + 57 + 105, 54 +
58 + 59, 54 + 58 + 60, 54 + 58 + 61, 54 + 58 + 62, 54 + 58 + 63, 54 + 58 + 64, 54 + 58 +
65, 54 + 58 + 98, 54 + 58 + 99, 54 + 58 + 103, 54 + 58 + 105, 54 + 59 + 60, 54 + 59 + 61,
54 + 59 + 62, 54 + 59 + 63, 54 + 59 + 64, 54 + 59 + 65, 54 + 59 + 98, 54 + 59 + 99, 54 +
59 + 103, 54 + 59 + 105, 54 + 60 + 61, 54 + 60 + 62, 54 + 60 + 63, 54 + 60 + 64, 54 + 60 +
65, 54 + 60 + 98, 54 + 60 + 99, 54 + 60 + 103, 54 + 60 + 105, 54 + 61 + 62, 54 + 61 + 63,
54 + 61 + 64, 54 + 61 + 65, 54 + 61 + 98, 54 + 61 + 99, 54 + 61 + 103, 54 + 61 + 105, 54 +
62 + 63, 54 + 62 + 64, 54 + 62 + 65, 54 + 62 + 98, 54 + 62 + 99, 54 + 62 + 103, 54 + 62 +
105, 54 + 63 + 64, 54 + 63 + 65, 54 + 63 + 98, 54 + 63 + 99, 54 + 63 + 103, 54 + 63 + 105,
54 + 64 + 65, 54 + 64 + 98, 54 + 64 + 99, 54 + 64 + 103, 54 + 64 + 105, 54 + 65 + 98, 54 +
65 + 99, 54 + 65 + 103, 54 + 65 + 105, 54 + 98 + 99, 54 + 98 + 103, 54 + 98 + 105, 54 +
99 + 103, 54 + 99 + 105, 54 + 103 + 105, 55 + 56 + 57, 55 + 56 + 58, 55 + 56 + 59, 55 +
56 + 60, 55 + 56 + 61, 55 + 56 + 62, 55 + 56 + 63, 55 + 56 + 64, 55 + 56 + 65, 55 + 56 +
98, 55 + 56 + 99, 55 + 56 + 103, 55 + 56 + 105, 55 + 57 + 58, 55 + 57 + 59, 55 + 57 + 60,
55 + 57 + 61, 55 + 57 + 62, 55 + 57 + 63, 55 + 57 + 64, 55 + 57 + 65, 55 + 57 + 98, 55 +
57 + 99, 55 + 57 + 103, 55 + 57 + 105, 55 + 58 + 59, 55 + 58 + 60, 55 + 58 + 61, 55 + 58 +
62, 55 + 58 + 63, 55 + 58 + 64, 55 + 58 + 65, 55 + 58 + 98, 55 + 58 + 99, 55 + 58 + 103,
55 + 58 + 105, 55 + 59 + 60, 55 + 59 + 61, 55 + 59 + 62, 55 + 59 + 63, 55 + 59 + 64, 55 +
59 + 65, 55 + 59 + 98, 55 + 59 + 99, 55 + 59 + 103, 55 + 59 + 105, 55 + 60 + 61, 55 + 60 +
62, 55 + 60 + 63, 55 + 60 + 64, 55 + 60 + 65, 55 + 60 + 98, 55 + 60 + 99, 55 + 60 + 103,
55 + 60 + 105, 55 + 61 + 62, 55 + 61 + 63, 55 + 61 + 64, 55 + 61 + 65, 55 + 61 + 98, 55 +
61 + 99, 55 + 61 + 103, 55 + 61 + 105, 55 + 62 + 63, 55 + 62 + 64, 55 + 62 + 65, 55 + 62 +
98, 55 + 62 + 99, 55 + 62 + 103, 55 + 62 + 105, 55 + 63 + 64, 55 + 63 + 65, 55 + 63 + 98,
55 + 63 + 99, 55 + 63 + 103, 55 + 63 + 105, 55 + 64 + 65, 55 + 64 + 98, 55 + 64 + 99, 55 +
64 + 103, 55 + 64 + 105, 55 + 65 + 98, 55 + 65 + 99, 55 + 65 + 103, 55 + 65 + 105, 55 +
98 + 99, 55 + 98 + 103, 55 + 98 + 105, 55 + 99 + 103, 55 + 99 + 105, 55 + 103 + 105, 56 +
57 + 58, 56 + 57 + 59, 56 + 57 + 60, 56 + 57 + 61, 56 + 57 + 62, 56 + 57 + 63, 56 + 57 +
64, 56 + 57 + 65, 56 + 57 + 98, 56 + 57 + 99, 56 + 57 + 103, 56 + 57 + 105, 56 + 58 + 59,
56 + 58 + 60, 56 + 58 + 61, 56 + 58 + 62, 56 + 58 + 63, 56 + 58 + 64, 56 + 58 + 65, 56 +
58 + 98, 56 + 58 + 99, 56 + 58 + 103, 56 + 58 + 105, 56 + 59 + 60, 56 + 59 + 61, 56 + 59 +
62, 56 + 59 + 63, 56 + 59 + 64, 56 + 59 + 65, 56 + 59 + 98, 56 + 59 + 99, 56 + 59 + 103,
56 + 59 + 105, 56 + 60 + 61, 56 + 60 + 62, 56 + 60 + 63, 56 + 60 + 64, 56 + 60 + 65, 56 +
60 + 98, 56 + 60 + 99, 56 + 60 + 103, 56 + 60 + 105, 56 + 61 + 62, 56 + 61 + 63, 56 + 61 +
64, 56 + 61 + 65, 56 + 61 + 98, 56 + 61 + 99, 56 + 61 + 103, 56 + 61 + 105, 56 + 62 + 63,
56 + 62 + 64, 56 + 62 + 65, 56 + 62 + 98, 56 + 62 + 99, 56 + 62 + 103, 56 + 62 + 105, 56 +
63 + 64, 56 + 63 + 65, 56 + 63 + 98, 56 + 63 + 99, 56 + 63 + 103, 56 + 63 + 105, 56 + 64 +
65, 56 + 64 + 98, 56 + 64 + 99, 56 + 64 + 103, 56 + 64 + 105, 56 + 65 + 98, 56 + 65 + 99,
56 + 65 + 103, 56 + 65 + 105, 56 + 98 + 99, 56 + 98 + 103, 56 + 98 + 105, 56 + 99 + 103,
56 + 99 + 105, 56 + 103 + 105, 57 + 58 + 59, 57 + 58 + 60, 57 + 58 + 61, 57 + 58 + 62, 57 +
58 + 63, 57 + 58 + 64, 57 + 58 + 65, 57 + 58 + 98, 57 + 58 + 99, 57 + 58 + 103, 57 + 58 +
105, 57 + 59 + 60, 57 + 59 + 61, 57 + 59 + 62, 57 + 59 + 63, 57 + 59 + 64, 57 + 59 + 65,
57 + 59 + 98, 57 + 59 + 99, 57 + 59 + 103, 57 + 59 + 105, 57 + 60 + 61, 57 + 60 + 62, 57 +
60 + 63, 57 + 60 + 64, 57 + 60 + 65, 57 + 60 + 98, 57 + 60 + 99, 57 + 60 + 103, 57 + 60 +
105, 57 + 61 + 62, 57 + 61 + 63, 57 + 61 + 64, 57 + 61 + 65, 57 + 61 + 98, 57 + 61 + 99,
57 + 61 + 103, 57 + 61 + 105, 57 + 62 + 63, 57 + 62 + 64, 57 + 62 + 65, 57 + 62 + 98, 57 +
62 + 99, 57 + 62 + 103, 57 + 62 + 105, 57 + 63 + 64, 57 + 63 + 65, 57 + 63 + 98, 57 + 63 +
99, 57 + 63 + 103, 57 + 63 + 105, 57 + 64 + 65, 57 + 64 + 98, 57 + 64 + 99, 57 + 64 + 103,
57 + 64 + 105, 57 + 65 + 98, 57 + 65 + 99, 57 + 65 + 103, 57 + 65 + 105, 57 + 98 + 99, 57 +
98 + 103, 57 + 98 + 105, 57 + 99 + 103, 57 + 99 + 105, 57 + 103 + 105, 58 + 59 + 60, 58 +
59 + 61, 58 + 59 + 62, 58 + 59 + 63, 58 + 59 + 64, 58 + 59 + 65, 58 + 59 + 98, 58 + 59 +
99, 58 + 59 + 103, 58 + 59 + 105, 58 + 60 + 61, 58 + 60 + 62, 58 + 60 + 63, 58 + 60 + 64,
58 + 60 + 65, 58 + 60 + 98, 58 + 60 + 99, 58 + 60 + 103, 58 + 60 + 105, 58 + 61 + 62, 58 +
61 + 63, 58 + 61 + 64, 58 + 61 + 65, 58 + 61 + 98, 58 + 61 + 99, 58 + 61 + 103, 58 + 61 +
105, 58 + 62 + 63, 58 + 62 + 64, 58 + 62 + 65, 58 + 62 + 98, 58 + 62 + 99, 58 + 62 + 103,
58 + 62 + 105, 58 + 63 + 64, 58 + 63 + 65, 58 + 63 + 98, 58 + 63 + 99, 58 + 63 + 103, 58 +
63 + 105, 58 + 64 + 65, 58 + 64 + 98, 58 + 64 + 99, 58 + 64 + 103, 58 + 64 + 105, 58 + 65 +
98, 58 + 65 + 99, 58 + 65 + 103, 58 + 65 + 105, 58 + 98 + 99, 58 + 98 + 103, 58 + 98 +
105, 58 + 99 + 103, 58 + 99 + 105, 58 + 103 + 105, 59 + 60 + 61, 59 + 60 + 62, 59 + 60 +
63, 59 + 60 + 64, 59 + 60 + 65, 59 + 60 + 98, 59 + 60 + 99, 59 + 60 + 103, 59 + 60 + 105,
59 + 61 + 62, 59 + 61 + 63, 59 + 61 + 64, 59 + 61 + 65, 59 + 61 + 98, 59 + 61 + 99, 59 +
61 + 103, 59 + 61 + 105, 59 + 62 + 63, 59 + 62 + 64, 59 + 62 + 65, 59 + 62 + 98, 59 + 62 +
99, 59 + 62 + 103, 59 + 62 + 105, 59 + 63 + 64, 59 + 63 + 65, 59 + 63 + 98, 59 + 63 + 99,
59 + 63 + 103, 59 + 63 + 105, 59 + 64 + 65, 59 + 64 + 98, 59 + 64 + 99, 59 + 64 + 103, 59 +
64 + 105, 59 + 65 + 98, 59 + 65 + 99, 59 + 65 + 103, 59 + 65 + 105, 59 + 98 + 99, 59 +
98 + 103, 59 + 98 + 105, 59 + 99 + 103, 59 + 99 + 105, 59 + 103 + 105, 60 + 61 + 62, 60 +
61 + 63, 60 + 61 + 64, 60 + 61 + 65, 60 + 61 + 98, 60 + 61 + 99, 60 + 61 + 103, 60 + 61 +
105, 60 + 62 + 63, 60 + 62 + 64, 60 + 62 + 65, 60 + 62 + 98, 60 + 62 + 99, 60 + 62 + 103,
60 + 62 + 105, 60 + 63 + 64, 60 + 63 + 65, 60 + 63 + 98, 60 + 63 + 99, 60 + 63 + 103, 60 +
63 + 105, 60 + 64 + 65, 60 + 64 + 98, 60 + 64 + 99, 60 + 64 + 103, 60 + 64 + 105, 60 + 65 +
98, 60 + 65 + 99, 60 + 65 + 103, 60 + 65 + 105, 60 + 98 + 99, 60 + 98 + 103, 60 + 98 +
105, 60 + 99 + 103, 60 + 99 + 105, 60 + 103 + 105, 61 + 62 + 63, 61 + 62 + 64, 61 + 62 +
65, 61 + 62 + 98, 61 + 62 + 99, 61 + 62 + 103, 61 + 62 + 105, 61 + 63 + 64, 61 + 63 + 65,
61 + 63 + 98, 61 + 63 + 99, 61 + 63 + 103, 61 + 63 + 105, 61 + 64 + 65, 61 + 64 + 98, 61 +
64 + 99, 61 + 64 + 103, 61 + 64 + 105, 61 + 65 + 98, 61 + 65 + 99, 61 + 65 + 103, 61 + 65 +
105, 61 + 98 + 99, 61 + 98 + 103, 61 + 98 + 105, 61 + 99 + 103, 61 + 99 + 105, 61 + 103 +
105, 62 + 63 + 64, 62 + 63 + 65, 62 + 63 + 98, 62 + 63 + 99, 62 + 63 + 103, 62 + 63 +
105, 62 + 64 + 65, 62 + 64 + 98, 62 + 64 + 99, 62 + 64 + 103, 62 + 64 + 105, 62 + 65 + 98,
62 + 65 + 99, 62 + 65 + 103, 62 + 65 + 105, 62 + 98 + 99, 62 + 98 + 103, 62 + 98 + 105,
62 + 99 + 103, 62 + 99 + 105, 62 + 103 + 105, 63 + 64 + 65, 63 + 64 + 98, 63 + 64 + 99,
63 + 64 + 103, 63 + 64 + 105, 63 + 65 + 98, 63 + 65 + 99, 63 + 65 + 103, 63 + 65 + 105,
63 + 98 + 99, 63 + 98 + 103, 63 + 98 + 105, 63 + 99 + 103, 63 + 99 + 105, 63 + 103 + 105,
64 + 65 + 98, 64 + 65 + 99, 64 + 65 + 103, 64 + 65 + 105, 64 + 98 + 99, 64 + 98 + 103, 64 +
98 + 105, 64 + 99 + 103, 64 + 99 + 105, 64 + 103 + 105, 65 + 98 + 99, 65 + 98 + 103, 65 +
98 + 105, 65 + 99 + 103, 65 + 99 + 105, 65 + 103 + 105, 98 + 99 + 103, 98 + 99 + 105,
98 + 103 + 105, 99+ 103 + 105

[0400] In some examples of any of the ABPCs described herein, a light chain variable domain includes a light chain variable domain that is at least 90% (e.g., at least 92%, at least 94%, at least 96%, at least 98%, at least 99%, or 100%) identical to SEQ ID NO: 305, where the light chain variable domain includes a histidine at any of the specific combinations of one or more amino acid positions in SEQ ID NO: 305 listed in Table 6.

[0401] In some examples of any of the ABPCs described herein, the first antigen-binding domain includes a light chain variable domain that is at least 90% (e.g., at least 92%, at least 94%, at least 96%, at least 98%, at least 99%, or 100%) identical to SEQ ID NO: 305, where the light chain variable domain includes an alanine at position 38 in SEQ ID NO: 305.

[0402] In some examples of any of the ABPCs described herein the first antigen-binding domain includes: a light chain variable domain that is at least 90% (e.g., at least 92%, at least 94%, at least 96%, at least 98%, at least 99%, or 100%) identical to SEQ ID NO: 305, where the light chain variable domain includes an alanine at position 38 in SEQ ID NO: 305, and a heavy chain variable domain that is at least 90% (e.g., at least 92%, at least 94%, at least 96%, at least 98%, at least 99%, or 100%) identical to SEQ ID NO: 304, where the heavy chain variable domain includes a histidine at one or more (e.g., one, two, three, four, five, six, seven, eight, nine, ten, eleven, twelve, thirteen, fourteen, fifteen, sixteen, seventeen, eighteen, nineteen, or twenty) amino acid positions in SEQ ID NO: 304 selected from the group consisting of: 27, 34, 35, 50, 51, 52, 54, 55, 56, 57, 58, 59, 60, 61, 62, 63, 64, 65, 98, 99, 103, and 105.

[0403] In some examples of any of the ABPCs described herein, the first antigen-binding domain includes a light chain variable domain that is at least 90% (e.g., at least 92%, at least 94%, at least 96%, at least 98%, at least 99%, or 100%) identical to SEQ ID NO: 305, where the light chain variable domain includes a histidine at one or more (e.g., one, two, three, four, five, six, seven, eight, nine, ten, eleven, twelve, thirteen, fourteen, fifteen, sixteen, seventeen, eighteen, nineteen, or twenty) amino acid positions in SEQ ID NO: 305 selected from the group consisting of: 27, 34, 35, 50, 51, 52, 54, 55, 56, 57, 58, 59, 60, 61, 62, 63, 64, 65, 98, 99, 103, and 105, and where the light chain variable domain includes an alanine at position 38 in SEQ ID NO: 305. In some examples of any of the ABPCs described herein the first antigen-binding domain includes: a light chain variable domain that is at least 90% (e.g., at least 92%, at least 94%, at least 96%, at least 98%, at least 99%, or 100%) identical to SEQ ID NO: 305, where the light chain variable domain includes a histidine at one or more (e.g., one, two, three, four, five, six, seven, eight, nine, ten, eleven, twelve, thirteen, fourteen, fifteen, sixteen, seventeen, eighteen, nineteen, or twenty) amino acid positions in SEQ ID NO: 305 selected from the group consisting of: 26, 30, 31, 34, 36, 54, 56, 57, 60, 93, 95, 99, and 101, and where the light chain variable domain includes an alanine at position 38 in SEQ ID NO: 305, and a heavy chain variable domain that is at least 90% (e.g., at least 92%, at least 94%, at least 96%, at least 98%, at least 99%, or 100%) identical to SEQ ID NO: 304, where the heavy chain variable domain includes a histidine at one or more (e.g., one, two, three, four, five, six, seven, eight, nine, ten, eleven, twelve, thirteen, fourteen, fifteen, sixteen, seventeen, eighteen, nineteen, or twenty) amino acid positions in SEQ ID NO: 304 selected from the group consisting of: 27, 34, 35, 50, 51, 52, 54, 55, 56, 57, 58, 59, 60, 61, 62, 63, 64, 65, 98, 99, 103, and 105.

[0404] In some examples of any of the ABPCs described herein, a light chain variable domain includes a light chain variable domain that is at least 90% (e.g., at least 92%, at least 94%, at least 96%, at least 98%, at least 99%, or 100%) identical to SEQ ID NO: 305, where the light chain variable domain includes a histidine at any of the specific combinations of one or more amino acid positions in SEQ ID NO: 305 listed in Table 6 and where the light chain variable domain includes an alanine at position 38 of SEQ ID NO: 305.

TABLE 6
Exemplary Combinations of Amino Acid Positions in SEQ
ID NO: 305 that can be Substituted with Histidine

26 + 30, 26 + 31, 26 + 34, 26 + 36, 26 + 54, 26 + 56, 26 + 57, 26 + 60, 26 + 93, 26 + 95, 26 +
99, 26 + 101, 30 + 31, 30 + 34, 30 + 36, 30 + 54, 30 + 56, 30 + 57, 30 + 60, 30 + 93, 30 +
95, 30 + 99, 30 + 101, 31 + 34, 31 + 36, 31 + 54, 31 + 56, 31 + 57, 31 + 60, 31 + 93, 31 +
95, 31 + 99, 31 + 101, 34 + 36, 34 + 54, 34 + 56, 34 + 57, 34 + 60, 34 + 93, 34 + 95, 34 +
99, 34 + 101, 36 + 54, 36 + 56, 36 + 57, 36 + 60, 36 + 93, 36 + 95, 36 + 99, 36 + 101, 54 +
56, 54 + 57, 54 + 60, 54 + 93, 54 + 95, 54 + 99, 54 + 101, 56 + 57, 56 + 60, 56 + 93, 56 +
95, 56 + 99, 56 + 101, 57 + 60, 57 + 93, 57 + 95, 57 + 99, 57 + 101, 60 + 93, 60 + 95, 60 +
99, 60 + 101, 93 + 95, 93 + 99, 93 + 101, 95 + 99, 95 + 101, 99 + 101, 26 + 30 + 31, 26 +
30 + 34, 26 + 30 + 36, 26 + 30 + 54, 26 + 30 + 56, 26 + 30 + 57, 26 + 30 + 60, 26 + 30 +
93, 26 + 30 + 95, 26 + 30 + 99, 26 + 30 + 101, 26 + 31 + 34, 26 + 31 + 36, 26 + 31 + 54,
26 + 31 + 56, 26 + 31 + 57, 26 + 31 + 60, 26 + 31 + 93, 26 + 31 + 95, 26 + 31 + 99, 26 +
31 + 101, 26 + 34 + 36, 26 + 34 + 54, 26 + 34 + 56, 26 + 34 + 57, 26 + 34 + 60, 26 + 34 +
93, 26 + 34 + 95, 26 + 34 + 99, 26 + 34 + 101, 26 + 36 + 54, 26 + 36 + 56, 26 + 36 + 57,
26 + 36 + 60, 26 + 36 + 93, 26 + 36 + 95, 26 + 36 + 99, 26 + 36 + 101, 26 + 54 + 56, 26 +
54 + 57, 26 + 54 + 60, 26 + 54 + 93, 26 + 54 + 95, 26 + 54 + 99, 26 + 54 + 101, 26 + 56 +
57, 26 + 56 + 60, 26 + 56 + 93, 26 + 56 + 95, 26 + 56 + 99, 26 + 56 + 101, 26 + 57 + 60,
26 + 57 + 93, 26 + 57 + 95, 26 + 57 + 99, 26 + 57 + 101, 26 + 60 + 93, 26 + 60 + 95, 26 +
60 + 99, 26 + 60 + 101, 26 + 93 + 95, 26 + 93 + 99, 26 + 93 + 101, 26 + 95 + 99, 26 + 95 +
101, 26 + 99 + 101, 30 + 31 + 34, 30 + 31 + 36, 30 + 31 + 54, 30 + 31 + 56, 30 + 31 + 57,
30 + 31 + 60, 30 + 31 + 93, 30 + 31 + 95, 30 + 31 + 99, 30 + 31 + 101, 30 + 34 + 36, 30 +
34 + 54, 30 + 34 + 56, 30 + 34 + 57, 30 + 34 + 60, 30 + 34 + 93, 30 + 34 + 95, 30 + 34 +
99, 30 + 34 + 101, 30 + 36 + 54, 30 + 36 + 56, 30 + 36 + 57, 30 + 36 + 60, 30 + 36 + 93,
30 + 36 + 95, 30 + 36 + 99, 30 + 36 + 101, 30 + 54 + 56, 30 + 54 + 57, 30 + 54 + 60, 30 +
54 + 93, 30 + 54 + 95, 30 + 54 + 99, 30 + 54 + 101, 30 + 56 + 57, 30 + 56 + 60, 30 + 56 +
93, 30 + 56 + 95, 30 + 56 + 99, 30 + 56 + 101, 30 + 57 + 60, 30 + 57 + 93, 30 + 57 + 95,
30 + 57 + 99, 30 + 57 + 101, 30 + 60 + 93, 30 + 60 + 95, 30 + 60 + 99, 30 + 60 + 101, 30 +
93 + 95, 30 + 93 + 99, 30 + 93 + 101, 30 + 95 + 99, 30 + 95 + 101, 30 + 99 + 101, 31 + 34 +
36, 31 + 34 + 54, 31 + 34 + 56, 31 + 34 + 57, 31 + 34 + 60, 31 + 34 + 93, 31 + 34 + 95,
31 + 34 + 99, 31 + 34 + 101, 31 + 36 + 54, 31 + 36 + 56, 31 + 36 + 57, 31 + 36 + 60, 31 +
36 + 93, 31 + 36 + 95, 31 + 36 + 99, 31 + 36 + 101, 31 + 54 + 56, 31 + 54 + 57, 31 + 54 +
60, 31 + 54 + 93, 31 + 54 + 95, 31 + 54 + 99, 31 + 54 + 101, 31 + 56 + 57, 31 + 56 + 60,
31 + 56 + 93, 31 + 56 + 95, 31 + 56 + 99, 31 + 56 + 101, 31 + 57 + 60, 31 + 57 + 93, 31 +
57 + 95, 31 + 57 + 99, 31 + 57 + 101, 31 + 60 + 93, 31 + 60 + 95, 31 + 60 + 99, 31 + 60 +
101, 31 + 93 + 95, 31 + 93 + 99, 31 + 93 + 101, 31 + 95 + 99, 31 + 95 + 101, 31 + 99 +
101, 34 + 36 + 54, 34 + 36 + 56, 34 + 36 + 57, 34 + 36 + 60, 34 + 36 + 93, 34 + 36 + 95,
34 + 36 + 99, 34 + 36 + 101, 34 + 54 + 56, 34 + 54 + 57, 34 + 54 + 60, 34 + 54 + 93, 34 +
54 + 95, 34 + 54 + 99, 34 + 54 + 101, 34 + 56 + 57, 34 + 56 + 60, 34 + 56 + 93, 34 + 56 +
95, 34 + 56 + 99, 34 + 56 + 101, 34 + 57 + 60, 34 + 57 + 93, 34 + 57 + 95, 34 + 57 + 99,
34 + 57 + 101, 34 + 60 + 93, 34 + 60 + 95, 34 + 60 + 99, 34 + 60 + 101, 34 + 93 + 95, 34 +
93 + 99, 34 + 93 + 101, 34 + 95 + 99, 34 + 95 + 101, 34 + 99 + 101, 36 + 54 + 56, 36 + 54 +
57, 36 + 54 + 60, 36 + 54 + 93, 36 + 54 + 95, 36 + 54 + 99, 36 + 54 + 101, 36 + 56 + 57,
36 + 56 + 60, 36 + 56 + 93, 36 + 56 + 95, 36 + 56 + 99, 36 + 56 + 101, 36 + 57 + 60, 36 +
57 + 93, 36 + 57 + 95, 36 + 57 + 99, 36 + 57 + 101, 36 + 60 + 93, 36 + 60 + 95, 36 + 60 +
99, 36 + 60 + 101, 36 + 93 + 95, 36 + 93 + 99, 36 + 93 + 101, 36 + 95 + 99, 36 + 95 + 101,
36 + 99 + 101, 54 + 56 + 57, 54 + 56 + 60, 54 + 56 + 93, 54 + 56 + 95, 54 + 56 + 99, 54 +
56 + 101, 54 + 57 + 60, 54 + 57 + 93, 54 + 57 + 95, 54 + 57 + 99, 54 + 57 + 101, 54 + 60 +
93, 54 + 60 + 95, 54 + 60 + 99, 54 + 60 + 101, 54 + 93 + 95, 54 + 93 + 99, 54 + 93 + 101,
54 + 95 + 99, 54 + 95 + 101, 54 + 99 + 101, 56 + 57 + 60, 56 + 57 + 93, 56 + 57 + 95, 56 +
57 + 99, 56 + 57 + 101, 56 + 60 + 93, 56 + 60 + 95, 56 + 60 + 99, 56 + 60 + 101, 56 + 93 +
95, 56 + 93 + 99, 56 + 93 + 101, 56 + 95 + 99, 56 + 95 + 101, 56 + 99 + 101, 57 + 60 + 93,
57 + 60 + 95, 57 + 60 + 99, 57 + 60 + 101, 57 + 93 + 95, 57 + 93 + 99, 57 + 93 + 101, 57 +
95 + 99, 57 + 95 + 101, 57 + 99 + 101, 60 + 93 + 95, 60 + 93 + 99, 60 + 93 + 101, 60 + 95
+ 99, 60 + 95 + 101, 60 + 99 + 101, 93 + 95 + 99, 93 + 95 + 101, 93 + 99 + 101, 95 + 99 +
101

[0405] In some examples of any of the ABPCs described herein, the first antigen-binding domain includes a heavy chain variable domain that is at least 90% (e.g., at least 92%, at least 94%, at least 96%, at least 98%, at least 99%, or 100%) identical to SEQ ID NO: 304, where the heavy chain variable domain includes a histidine at any of the specific combinations of one or more amino acid positions in SEQ ID NO: 304 listed in Table 5; and a light chain variable domain that that is at least 90% (e.g., at least 92%, at least 94%, at least 96%, at least 98%, at least 99%, or 100%) identical to SEQ ID NO: 305, where the light chain variable domain includes a histidine at any of the specific combinations of one or more amino acid positions in SEQ ID NO: 305 listed in Table 6.

[0406] In some examples of any of the ABPCs described herein, the first antigen-binding domain comprises a light chain variable domain comprising SEQ ID NO: 305, and a heavy chain variable domain that is at least 90% identical (e.g., at least 92%, at least 94%, at least 96%, at least 98%, at least 99%, or 100%) identical to SEQ ID NO: 304, where the heavy chain variable domain includes a histidine at any of the specific combinations of one or more (e.g., two, three, four, five, six, seven, eight, nine, or ten) amino acid positions in SEQ ID NO: 304 listed in Table 5.

[0407] In some examples of any of the ABPCs described herein, the first antigen-binding domain comprises a light chain variable domain that is at least 90% identical to SEQ ID NO: 305, wherein the light chain variable domain includes a histidine at position 26 in SEQ ID NO: 305; and a heavy chain variable domain that is at least 90% (e.g., at least 92%, at least 94%, at least 96%, at least 98%, at least 99%, or 100%) identical to SEQ ID NO: 304, where the heavy chain variable domain includes a histidine at any of the specific combinations of one or more amino acid positions in SEQ ID NO: 304 listed in Table 5.

[0408] In some examples of any of the ABPCs described herein, the first antigen-binding domain comprises a light chain variable domain that is at least 90% identical to SEQ ID NO: 305, wherein the light chain variable domain includes a histidine at position 30 in SEQ ID NO: 305; and a heavy chain variable domain that is at least 90% (e.g., at least 92%, at least 94%, at least 96%, at least 98%, at least 99%, or 100%) identical to SEQ ID NO: 304, where the heavy chain variable domain includes a histidine at any of the specific combinations of one or more amino acid positions in SEQ ID NO: 304 listed in Table 5.

[0409] In some examples of any of the ABPCs described herein, the first antigen-binding domain comprises a light chain variable domain that is at least 90% identical to SEQ ID NO: 305, wherein the light chain variable domain includes a histidine at position 31 in SEQ ID NO: 305; and a heavy chain variable domain that is at least 90% (e.g., at least 92%, at least 94%, at least 96%, at least 98%, at least 99%, or 100%) identical to SEQ ID NO: 304, where the heavy chain variable domain includes a histidine at any of the specific combinations of one or more amino acid positions in SEQ ID NO: 304 listed in Table 5.

[0410] In some examples of any of the ABPCs described herein, the first antigen-binding domain comprises a light chain variable domain that is at least 90% identical to SEQ ID NO: 305, wherein the light chain variable domain includes a histidine at position 34 in SEQ ID NO: 305; and a heavy chain variable domain that is at least 90% (e.g., at least 92%, at least 94%, at least 96%, at least 98%, at least 99%, or 100%) identical to SEQ ID NO: 304, where the heavy chain variable domain includes a histidine at any of the specific combinations of one or more amino acid positions in SEQ ID NO: 304 listed in Table 5.

[0411] In some examples of any of the ABPCs described herein, the first antigen-binding domain comprises a light chain variable domain that is at least 90% identical to SEQ ID NO: 305, wherein the light chain variable domain includes a histidine at position 36 in SEQ ID NO: 305; and a heavy chain variable domain that is at least 90% (e.g., at least 92%, at least 94%, at least 96%, at least 98%, at least 99%, or 100%) identical to SEQ ID NO: 304, where the heavy chain variable domain includes a histidine at any of the specific combinations of one or more amino acid positions in SEQ ID NO: 304 listed in Table 5.

[0412] In some examples of any of the ABPCs described herein, the first antigen-binding domain comprises a light chain variable domain that is at least 90% identical to SEQ ID NO: 305, wherein the light chain variable domain includes a histidine at position 54 in SEQ ID NO: 305; and a heavy chain variable domain that is at least 90% (e.g., at least 92%, at least 94%, at least 96%, at least 98%, at least 99%, or 100%) identical to SEQ ID NO: 304, where the heavy chain variable domain includes a histidine at any of the specific combinations of one or more amino acid positions in SEQ ID NO: 304 listed in Table 5.

[0413] In some examples of any of the ABPCs described herein, the first antigen-binding domain comprises a light chain variable domain that is at least 90% identical to SEQ ID NO: 305, wherein the light chain variable domain includes a histidine at position 56 in SEQ ID NO: 305; and a heavy chain variable domain that is at least 90% (e.g., at least 92%, at least 94%, at least 96%, at least 98%, at least 99%, or 100%) identical to SEQ ID NO: 304, where the heavy chain variable domain includes a histidine at any of the specific combinations of one or more amino acid positions in SEQ ID NO: 304 listed in Table 5.

[0414] In some examples of any of the ABPCs described herein, the first antigen-binding domain comprises a light chain variable domain that is at least 90% identical to SEQ ID NO: 305, wherein the light chain variable domain includes a histidine at position 57 in SEQ ID NO: 305; and a heavy chain variable domain that is at least 90% (e.g., at least 92%, at least 94%, at least 96%, at least 98%, at least 99%, or 100%) identical to SEQ ID NO: 304, where the heavy chain variable domain includes a histidine at any of the specific combinations of one or more amino acid positions in SEQ ID NO: 304 listed in Table 5.

[0415] In some examples of any of the ABPCs described herein, the first antigen-binding domain comprises a light chain variable domain that is at least 90% identical to SEQ ID NO: 305, wherein the light chain variable domain includes a histidine at position 60 in SEQ ID NO: 305; and a heavy chain variable domain that is at least 90% (e.g., at least 92%, at least 94%, at least 96%, at least 98%, at least 99%, or 100%) identical to SEQ ID NO: 304, where the heavy chain variable domain includes a histidine at any of the specific combinations of one or more amino acid positions in SEQ ID NO: 304 listed in Table 5.

[0416] In some examples of any of the ABPCs described herein, the first antigen-binding domain comprises a light chain variable domain that is at least 90% identical to SEQ ID NO: 305, wherein the light chain variable domain includes a histidine at position 93 in SEQ ID NO: 305; and a heavy chain variable domain that is at least 90% (e.g., at least 92%, at least 94%, at least 96%, at least 98%, at least 99%, or 100%) identical to SEQ ID NO: 304, where the heavy chain variable domain includes a histidine at any of the specific combinations of one or more amino acid positions in SEQ ID NO: 304 listed in Table 5.

[0417] In some examples of any of the ABPCs described herein, the first antigen-binding domain comprises a light chain variable domain that is at least 90% identical to SEQ ID NO: 305, wherein the light chain variable domain includes a histidine at position 95 in SEQ ID NO: 305; and a heavy chain variable domain that is at least 90% (e.g., at least 92%, at least 94%, at least 96%, at least 98%, at least 99%, or 100%) identical to SEQ ID NO: 304, where the heavy chain variable domain includes a histidine at any of the specific combinations of one or more amino acid positions in SEQ ID NO: 304 listed in Table 5.

[0418] In some examples of any of the ABPCs described herein, the first antigen-binding domain comprises a light chain variable domain that is at least 90% identical to SEQ ID NO: 305, wherein the light chain variable domain includes a histidine at position 99 in SEQ ID NO: 305; and a heavy chain variable domain that is at least 90% (e.g., at least 92%, at least 94%, at least 96%, at least 98%, at least 99%, or 100%) identical to SEQ ID NO: 304, where the heavy chain variable domain includes a histidine at any of the specific combinations of one or more amino acid positions in SEQ ID NO: 304 listed in Table 5.

[0419] In some examples of any of the ABPCs described herein, the first antigen-binding domain comprises a light chain variable domain that is at least 90% identical to SEQ ID NO: 305, wherein the light chain variable domain includes a histidine at position 101 in SEQ ID NO: 305; and a heavy chain variable domain that is at least 90% (e.g., at least 92%, at least 94%, at least 96%, at least 98%, at least 99%, or 100%) identical to SEQ ID NO: 304, where the heavy chain variable domain includes a histidine at any of the specific combinations of one or more amino acid positions in SEQ ID NO: 304 listed in Table 5.

[0420] In some examples of any of the ABPCs described herein, the first antigen-binding domain comprises a light chain variable domain that is at least 90% identical to SEQ ID NO: 305, wherein the light chain variable domain includes an alanine at position 38 in SEQ ID NO: 305; and a heavy chain variable domain that is at least 90% (e.g., at least 92%, at least 94%, at least 96%, at least 98%, at least 99%, or 100%) identical to SEQ ID NO: 304, where the heavy chain variable domain includes a histidine at any of the specific combinations of one or more amino acid positions in SEQ ID NO: 304 listed in Table 5.

[0421] In some examples of any of the ABPCs described herein, the first antigen-binding domain includes a heavy chain variable domain of hucMET27Gv1.3 with one or more (e.g., one, two, three, four, five, six, seven, eight, nine, ten, eleven, twelve, thirteen, fourteen, fifteen, sixteen, seventeen, eighteen, nineteen, or twenty) histidine(s) substituted with an alanine. In some examples of any of the ABPCs described herein, the first antigen-binding domain includes a light chain variable domain of hucMET27Gv1.3 with one or more (e.g., one, two, three, four, five, six, seven, eight, nine, ten, eleven, twelve, thirteen, fourteen, fifteen, sixteen, seventeen, eighteen, nineteen, or twenty) histidine(s) substituted with an alanine. In some examples of any of the ABPCs described herein, the first antigen-binding domain includes a heavy chain variable domain of hucMET27Gv1.3 with one or more (e.g., one, two, three, four, five, six, seven, eight, nine, ten, eleven, twelve, thirteen, fourteen, fifteen, sixteen, seventeen, eighteen, nineteen, or twenty) histidines substituted with an alanine; and a light chain variable domain of hucMET27Gv1.3 with one or more (e.g., one, two, three, four, five, six, seven, eight, nine, ten, eleven, twelve, thirteen, fourteen, fifteen, sixteen, seventeen, eighteen, nineteen, or twenty) histidine(s) substituted with an alanine. In some examples of any of the ABPCs described herein, the heavy chain variable domain of hucMET27Gv1.3 comprises SEQ ID NO: 304. In some examples of any of the ABPCs described herein, the light chain variable domain of hucMET27Gv1.3 comprises SEQ ID NO: 305.

[0422] In some examples of any of the ABPCs described herein, the first antigen-binding domain comprises a heavy chain variable domain comprising a CDR1, a CDR2, and a CDR3 of SEQ ID NO: 306, SEQ ID NO: 307, and SEQ ID NO: 308, respectively, with collectively a total of one or more (e.g., one, two, three, four, five, six, seven, eight, nine, or ten) histidine(s) in SEQ ID NOs: 306-308 substituted with an alanine. In some examples of any of the ABPCs described herein, the first antigen-binding domain comprises a light chain variable domain comprising a CDR1, a CDR2, and a CDR3 of SEQ ID NO: 309, SEQ ID NO: 310, and SEQ ID NO: 311, respectively, with collectively a total of one or more (e.g., one, two, three, four, five, six, seven, eight, nine, or ten) histidine(s) in SEQ ID NOs: 309-311 substituted with an alanine. In some examples of any of the ABPCs described herein, the first antigen-binding domain includes: a heavy chain variable domain comprising a CDR1, a CDR2, and a CDR3 of SEQ ID NO: 306, SEQ ID NO: 307, and SEQ ID NO: 308, respectively, with collectively a total of one or more (e.g., one, two, three, four, five, six, seven, eight, nine, or ten) histidine(s) in SEQ ID NOs: 306-308 substituted with an alanine; and a light chain variable domain comprising a CDR1, a CDR2, and a CDR3 of SEQ ID NO: 309, SEQ ID NO: 310, and SEQ ID NO: 311, respectively, with collectively a total of one or more (e.g., one, two, three, four, five, six, seven, eight, nine, or ten) histidine(s) in SEQ ID NOs: 309-311 substituted with an alanine.

[0423] In some examples of any of the ABPCs described herein, the first antigen-binding domain comprises a heavy chain variable domain of SEQ ID NO: 304, SEQ ID NO: 312, SEQ ID NO: 313, SEQ ID NO: 314, SEQ ID NO: 315, SEQ ID NO: 316, SEQ ID NO: 317, SEQ ID NO: 318, SEQ ID NO: 319, SEQ ID NO: 320, SEQ ID NO: 321, SEQ ID NO: 322, SEQ ID NO: 323, SEQ ID NO: 324, SEQ ID NO: 325, SEQ ID NO: 326, SEQ ID NO: 327, SEQ ID NO: 328, SEQ ID NO: 329, SEQ ID NO: 330, SEQ ID NO: 331, SEQ ID NO: 332, SEQ ID NO: 333, SEQ ID NO: 334, SEQ ID NO: 335, SEQ ID NO: 336, SEQ ID NO: 337, SEQ ID NO: 338, SEQ ID NO: 339, SEQ ID NO: 340, SEQ ID NO: 341, SEQ ID NO: 342, SEQ ID NO: 343, SEQ ID NO: 344, SEQ ID NO: 345, SEQ ID NO: 346, SEQ ID NO: 347, SEQ ID NO: 348, or SEQ ID NO: 349.

[0424] In some examples of any of the ABPCs described herein, the first antigen-binding domain includes a light chain variable domain of SEQ ID NO: 305, SEQ ID NO: 350, SEQ ID NO: 351, SEQ ID NO: 352, SEQ ID NO: 353, SEQ ID NO: 354, SEQ ID NO: 355, SEQ ID NO: 356, SEQ ID NO: 357, SEQ ID NO: 358, SEQ ID NO: 359, SEQ ID NO: 360, SEQ ID NO: 361, SEQ ID NO: 362, SEQ ID NO: 363, SEQ ID NO: 364, SEQ ID NO: 365, SEQ ID NO: 366, SEQ ID NO: 367, SEQ ID NO: 368, SEQ ID NO: 369, SEQ ID NO: 370, SEQ ID NO: 371, SEQ ID NO: 372, SEQ ID NO: 373, SEQ ID NO: 374, SEQ ID NO: 375, SEQ ID NO: 376, SEQ ID NO: 377, SEQ ID NO: 378, SEQ ID NO: 379, or SEQ ID NO: 380.

[0425] In some examples of any of the ABPCs described herein, the first antigen-binding domain includes a light chain variable domain comprising SEQ ID NO: 305, and a heavy chain variable domain comprising: SEQ ID NO: 312, SEQ ID NO: 313, SEQ ID NO: 314, SEQ ID NO: 315, SEQ ID NO: 316, SEQ ID NO: 317, SEQ ID NO: 318, SEQ ID NO: 319, SEQ ID NO: 320, SEQ ID NO: 321, SEQ ID NO: 322, SEQ ID NO: 323, SEQ ID NO: 324, SEQ ID NO: 325, SEQ ID NO: 326, SEQ ID NO: 327, SEQ ID NO: 328, SEQ ID NO: 329, SEQ ID NO: 330, SEQ ID NO: 331, SEQ ID NO: 332, SEQ ID NO: 333, SEQ ID NO: 334, SEQ ID NO: 335, SEQ ID NO: 336, SEQ ID NO: 337, SEQ ID NO: 338, SEQ ID NO: 339, SEQ ID NO: 340, SEQ ID NO: 341, SEQ ID NO: 342, SEQ ID NO: 343, SEQ ID NO: 344, SEQ ID NO: 345, SEQ ID NO: 346, SEQ ID NO: 347, SEQ ID NO: 348, or SEQ ID NO: 349.

[0426] In some examples of any of the ABPCs described herein, the first antigen-binding domain includes a light chain variable domain comprising SEQ ID NO: 350, and a heavy chain variable domain comprising: SEQ ID NO: 304, SEQ ID NO: 312, SEQ ID NO: 313, SEQ ID NO: 314, SEQ ID NO: 315, SEQ ID NO: 316, SEQ ID NO: 317, SEQ ID NO: 318, SEQ ID NO: 319, SEQ ID NO: 320, SEQ ID NO: 321, SEQ ID NO: 322, SEQ ID NO: 323, SEQ ID NO: 324, SEQ ID NO: 325, SEQ ID NO: 326, SEQ ID NO: 327, SEQ ID NO: 328, SEQ ID NO: 329, SEQ ID NO: 330, SEQ ID NO: 331, SEQ ID NO: 332, SEQ ID NO: 333, SEQ ID NO: 334, SEQ ID NO: 335, SEQ ID NO: 336, SEQ ID NO: 337, SEQ ID NO: 338, SEQ ID NO: 339, SEQ ID NO: 340, SEQ ID NO: 341, SEQ ID NO: 342, SEQ ID NO: 343, SEQ ID NO: 344, SEQ ID NO: 345, SEQ ID NO: 346, SEQ ID NO: 347, SEQ ID NO: 348, or SEQ ID NO: 349.

[0427] In some examples of any of the ABPCs described herein, the first antigen-binding domain includes a light chain variable domain comprising SEQ ID NO: 351, and a heavy chain variable domain comprising: SEQ ID NO: 304, SEQ ID NO: 312, SEQ ID NO: 313, SEQ ID NO: 314, SEQ ID NO: 315, SEQ ID NO: 316, SEQ ID NO: 317, SEQ ID NO: 318, SEQ ID NO: 319, SEQ ID NO: 320, SEQ ID NO: 321, SEQ ID NO: 322, SEQ ID NO: 323, SEQ ID NO: 324, SEQ ID NO: 325, SEQ ID NO: 326, SEQ ID NO: 327, SEQ ID NO: 328, SEQ ID NO: 329, SEQ ID NO: 330, SEQ ID NO: 331, SEQ ID NO: 332, SEQ ID NO: 333, SEQ ID NO: 334, SEQ ID NO: 335, SEQ ID NO: 336, SEQ ID NO: 337, SEQ ID NO: 338, SEQ ID NO: 339, SEQ ID NO: 340, SEQ ID NO: 341, SEQ ID NO: 342, SEQ ID NO: 343, SEQ ID NO: 344, SEQ ID NO: 345, SEQ ID NO: 346, SEQ ID NO: 347, SEQ ID NO: 348, or SEQ ID NO: 349.

[0428] In some examples of any of the ABPCs described herein, the first antigen-binding domain includes a light chain variable domain comprising SEQ ID NO: 352, and a heavy chain variable domain comprising: SEQ ID NO: 304, SEQ ID NO: 312, SEQ ID NO: 313, SEQ ID NO: 314, SEQ ID NO: 315, SEQ ID NO: 316, SEQ ID NO: 317, SEQ ID NO: 318, SEQ ID NO: 319, SEQ ID NO: 320, SEQ ID NO: 321, SEQ ID NO: 322, SEQ ID NO: 323, SEQ ID NO: 324, SEQ ID NO: 325, SEQ ID NO: 326, SEQ ID NO: 327, SEQ ID NO: 328, SEQ ID NO: 329, SEQ ID NO: 330, SEQ ID NO: 331, SEQ ID NO: 332, SEQ ID NO: 333, SEQ ID NO: 334, SEQ ID NO: 335, SEQ ID NO: 336, SEQ ID NO: 337, SEQ ID NO: 338, SEQ ID NO: 339, SEQ ID NO: 340, SEQ ID NO: 341, SEQ ID NO: 342, SEQ ID NO: 343, SEQ ID NO: 344, SEQ ID NO: 345, SEQ ID NO: 346, SEQ ID NO: 347, SEQ ID NO: 348, or SEQ ID NO: 349.

[0429] In some examples of any of the ABPCs described herein, the first antigen-binding domain includes a light chain variable domain comprising SEQ ID NO: 353, and a heavy chain variable domain comprising: SEQ ID NO: 304, SEQ ID NO: 312, SEQ ID NO: 313, SEQ ID NO: 314, SEQ ID NO: 315, SEQ ID NO: 316, SEQ ID NO: 317, SEQ ID NO: 318, SEQ ID NO: 319, SEQ ID NO: 320, SEQ ID NO: 321, SEQ ID NO: 322, SEQ ID NO: 323, SEQ ID NO: 324, SEQ ID NO: 325, SEQ ID NO: 326, SEQ ID NO: 327, SEQ ID NO: 328, SEQ ID NO: 329, SEQ ID NO: 330, SEQ ID NO: 331, SEQ ID NO: 332, SEQ ID NO: 333, SEQ ID NO: 334, SEQ ID NO: 335, SEQ ID NO: 336, SEQ ID NO: 337, SEQ ID NO: 338, SEQ ID NO: 339, SEQ ID NO: 340, SEQ ID NO: 341, SEQ ID NO: 342, SEQ ID NO: 343, SEQ ID NO: 344, SEQ ID NO: 345, SEQ ID NO: 346, SEQ ID NO: 347, SEQ ID NO: 348, or SEQ ID NO: 349.

[0430] In some examples of any of the ABPCs described herein, the first antigen-binding domain includes a light chain variable domain comprising SEQ ID NO: 354, and a heavy chain variable domain comprising: SEQ ID NO: 304, SEQ ID NO: 312, SEQ ID NO: 313, SEQ ID NO: 314, SEQ ID NO: 315, SEQ ID NO: 316, SEQ ID NO: 317, SEQ ID NO: 318, SEQ ID NO: 319, SEQ ID NO: 320, SEQ ID NO: 321, SEQ ID NO: 322, SEQ ID NO: 323, SEQ ID NO: 324, SEQ ID NO: 325, SEQ ID NO: 326, SEQ ID NO: 327, SEQ ID NO: 328, SEQ ID NO: 329, SEQ ID NO: 330, SEQ ID NO: 331, SEQ ID NO: 332, SEQ ID NO: 333, SEQ ID NO: 334, SEQ ID NO: 335, SEQ ID NO: 336, SEQ ID NO: 337, SEQ ID NO: 338, SEQ ID NO: 339, SEQ ID NO: 340, SEQ ID NO: 341, SEQ ID NO: 342, SEQ ID NO: 343, SEQ ID NO: 344, SEQ ID NO: 345, SEQ ID NO: 346, SEQ ID NO: 347, SEQ ID NO: 348, or SEQ ID NO: 349.

[0431] In some examples of any of the ABPCs described herein, the first antigen-binding domain includes a light chain variable domain comprising SEQ ID NO: 355, and a heavy chain variable domain comprising: SEQ ID NO: 304, SEQ ID NO: 312, SEQ ID NO: 313, SEQ ID NO: 314, SEQ ID NO: 315, SEQ ID NO: 316, SEQ ID NO: 317, SEQ ID NO: 318, SEQ ID NO: 319, SEQ ID NO: 320, SEQ ID NO: 321, SEQ ID NO: 322, SEQ ID NO: 323, SEQ ID NO: 324, SEQ ID NO: 325, SEQ ID NO: 326, SEQ ID NO: 327, SEQ ID NO: 328, SEQ ID NO: 329, SEQ ID NO: 330, SEQ ID NO: 331, SEQ ID NO: 332, SEQ ID NO: 333, SEQ ID NO: 334, SEQ ID NO: 335, SEQ ID NO: 336, SEQ ID NO: 337, SEQ ID NO: 338, SEQ ID NO: 339, SEQ ID NO: 340, SEQ ID NO: 341, SEQ ID NO: 342, SEQ ID NO: 343, SEQ ID NO: 344, SEQ ID NO: 345, SEQ ID NO: 346, SEQ ID NO: 347, SEQ ID NO: 348, or SEQ ID NO: 349.

[0432] In some examples of any of the ABPCs described herein, the first antigen-binding domain includes a light chain variable domain comprising SEQ ID NO: 356, and a heavy chain variable domain comprising: SEQ ID NO: 304, SEQ ID NO: 312, SEQ ID NO: 313, SEQ ID NO: 314, SEQ ID NO: 315, SEQ ID NO: 316, SEQ ID NO: 317, SEQ ID NO: 318, SEQ ID NO: 319, SEQ ID NO: 320, SEQ ID NO: 321, SEQ ID NO: 322, SEQ ID NO: 323, SEQ ID NO: 324, SEQ ID NO: 325, SEQ ID NO: 326, SEQ ID NO: 327, SEQ ID NO: 328, SEQ ID NO: 329, SEQ ID NO: 330, SEQ ID NO: 331, SEQ ID NO: 332, SEQ ID NO: 333, SEQ ID NO: 334, SEQ ID NO: 335, SEQ ID NO: 336, SEQ ID NO: 337, SEQ ID NO: 338, SEQ ID NO: 339, SEQ ID NO: 340, SEQ ID NO: 341, SEQ ID NO: 342, SEQ ID NO: 343, SEQ ID NO: 344, SEQ ID NO: 345, SEQ ID NO: 346, SEQ ID NO: 347, SEQ ID NO: 348, or SEQ ID NO: 349.

[0433] In some examples of any of the ABPCs described herein, the first antigen-binding domain includes a light chain variable domain comprising SEQ ID NO: 357, and a heavy chain variable domain comprising: SEQ ID NO: 304, SEQ ID NO: 312, SEQ ID NO: 313, SEQ ID NO: 314, SEQ ID NO: 315, SEQ ID NO: 316, SEQ ID NO: 317, SEQ ID NO: 318, SEQ ID NO: 319, SEQ ID NO: 320, SEQ ID NO: 321, SEQ ID NO: 322, SEQ ID NO: 323, SEQ ID NO: 324, SEQ ID NO: 325, SEQ ID NO: 326, SEQ ID NO: 327, SEQ ID NO: 328, SEQ ID NO: 329, SEQ ID NO: 330, SEQ ID NO: 331, SEQ ID NO: 332, SEQ ID NO: 333, SEQ ID NO: 334, SEQ ID NO: 335, SEQ ID NO: 336, SEQ ID NO: 337, SEQ ID NO: 338, SEQ ID NO: 339, SEQ ID NO: 340, SEQ ID NO: 341, SEQ ID NO: 342, SEQ ID NO: 343, SEQ ID NO: 344, SEQ ID NO: 345, SEQ ID NO: 346, SEQ ID NO: 347, SEQ ID NO: 348, or SEQ ID NO: 349.

[0434] In some examples of any of the ABPCs described herein, the first antigen-binding domain includes a light chain variable domain comprising SEQ ID NO: 358, and a heavy chain variable domain comprising: SEQ ID NO: 304, SEQ ID NO: 312, SEQ ID NO: 313, SEQ ID NO: 314, SEQ ID NO: 315, SEQ ID NO: 316, SEQ ID NO: 317, SEQ ID NO: 318, SEQ ID NO: 319, SEQ ID NO: 320, SEQ ID NO: 321, SEQ ID NO: 322, SEQ ID NO: 323, SEQ ID NO: 324, SEQ ID NO: 325, SEQ ID NO: 326, SEQ ID NO: 327, SEQ ID NO: 328, SEQ ID NO: 329, SEQ ID NO: 330, SEQ ID NO: 331, SEQ ID NO: 332, SEQ ID NO: 333, SEQ ID NO: 334, SEQ ID NO: 335, SEQ ID NO: 336, SEQ ID NO: 337, SEQ ID NO: 338, SEQ ID NO: 339, SEQ ID NO: 340, SEQ ID NO: 341, SEQ ID NO: 342, SEQ ID NO: 343, SEQ ID NO: 344, SEQ ID NO: 345, SEQ ID NO: 346, SEQ ID NO: 347, SEQ ID NO: 348, or SEQ ID NO: 349.

[0435] In some examples of any of the ABPCs described herein, the first antigen-binding domain includes a light chain variable domain comprising SEQ ID NO: 359, and a heavy chain variable domain comprising: SEQ ID NO: 304, SEQ ID NO: 312, SEQ ID NO: 313, SEQ ID NO: 314, SEQ ID NO: 315, SEQ ID NO: 316, SEQ ID NO: 317, SEQ ID NO: 318, SEQ ID NO: 319, SEQ ID NO: 320, SEQ ID NO: 321, SEQ ID NO: 322, SEQ ID NO: 323, SEQ ID NO: 324, SEQ ID NO: 325, SEQ ID NO: 326, SEQ ID NO: 327, SEQ ID NO: 328, SEQ ID NO: 329, SEQ ID NO: 330, SEQ ID NO: 331, SEQ ID NO: 332, SEQ ID NO: 333, SEQ ID NO: 334, SEQ ID NO: 335, SEQ ID NO: 336, SEQ ID NO: 337, SEQ ID NO: 338, SEQ ID NO: 339, SEQ ID NO: 340, SEQ ID NO: 341, SEQ ID NO: 342, SEQ ID NO: 343, SEQ ID NO: 344, SEQ ID NO: 345, SEQ ID NO: 346, SEQ ID NO: 347, SEQ ID NO: 348, or SEQ ID NO: 349.

[0436] In some examples of any of the ABPCs described herein, the first antigen-binding domain includes a light chain variable domain comprising SEQ ID NO: 360, and a heavy chain variable domain comprising: SEQ ID NO: 304, SEQ ID NO: 312, SEQ ID NO: 313, SEQ ID NO: 314, SEQ ID NO: 315, SEQ ID NO: 316, SEQ ID NO: 317, SEQ ID NO: 318, SEQ ID NO: 319, SEQ ID NO: 320, SEQ ID NO: 321, SEQ ID NO: 322, SEQ ID NO: 323, SEQ ID NO: 324, SEQ ID NO: 325, SEQ ID NO: 326, SEQ ID NO: 327, SEQ ID NO: 328, SEQ ID NO: 329, SEQ ID NO: 330, SEQ ID NO: 331, SEQ ID NO: 332, SEQ ID NO: 333, SEQ ID NO: 334, SEQ ID NO: 335, SEQ ID NO: 336, SEQ ID NO: 337, SEQ ID NO: 338, SEQ ID NO: 339, SEQ ID NO: 340, SEQ ID NO: 341, SEQ ID NO: 342, SEQ ID NO: 343, SEQ ID NO: 344, SEQ ID NO: 345, SEQ ID NO: 346, SEQ ID NO: 347, SEQ ID NO: 348, or SEQ ID NO: 349.

[0437] In some examples of any of the ABPCs described herein, the first antigen-binding domain includes a light chain variable domain comprising SEQ ID NO: 361, and a heavy chain variable domain comprising: SEQ ID NO: 304, SEQ ID NO: 312, SEQ ID NO: 313, SEQ ID NO: 314, SEQ ID NO: 315, SEQ ID NO: 316, SEQ ID NO: 317, SEQ ID NO: 318, SEQ ID NO: 319, SEQ ID NO: 320, SEQ ID NO: 321, SEQ ID NO: 322, SEQ ID NO: 323, SEQ ID NO: 324, SEQ ID NO: 325, SEQ ID NO: 326, SEQ ID NO: 327, SEQ ID NO: 328, SEQ ID NO: 329, SEQ ID NO: 330, SEQ ID NO: 331, SEQ ID NO: 332, SEQ ID NO: 333, SEQ ID NO: 334, SEQ ID NO: 335, SEQ ID NO: 336, SEQ ID NO: 337, SEQ ID NO: 338, SEQ ID NO: 339, SEQ ID NO: 340, SEQ ID NO: 341, SEQ ID NO: 342, SEQ ID NO: 343, SEQ ID NO: 344, SEQ ID NO: 345, SEQ ID NO: 346, SEQ ID NO: 347, SEQ ID NO: 348, or SEQ ID NO: 349.

[0438] In some examples of any of the ABPCs described herein, the first antigen-binding domain includes a light chain variable domain comprising SEQ ID NO: 362, and a heavy chain variable domain comprising: SEQ ID NO: 304, SEQ ID NO: 312, SEQ ID NO: 313, SEQ ID NO: 314, SEQ ID NO: 315, SEQ ID NO: 316, SEQ ID NO: 317, SEQ ID NO: 318, SEQ ID NO: 319, SEQ ID NO: 320, SEQ ID NO: 321, SEQ ID NO: 322, SEQ ID NO: 323, SEQ ID NO: 324, SEQ ID NO: 325, SEQ ID NO: 326, SEQ ID NO: 327, SEQ ID NO: 328, SEQ ID NO: 329, SEQ ID NO: 330, SEQ ID NO: 331, SEQ ID NO: 332, SEQ ID NO: 333, SEQ ID NO: 334, SEQ ID NO: 335, SEQ ID NO: 336, SEQ ID NO: 337, SEQ ID NO: 338, SEQ ID NO: 339, SEQ ID NO: 340, SEQ ID NO: 341, SEQ ID NO: 342, SEQ ID NO: 343, SEQ ID NO: 344, SEQ ID NO: 345, SEQ ID NO: 346, SEQ ID NO: 347, SEQ ID NO: 348, or SEQ ID NO: 349.

[0439] In some examples of any of the ABPCs described herein, the first antigen-binding domain includes a light chain variable domain comprising SEQ ID NO: 363, and a heavy chain variable domain comprising: SEQ ID NO: 304, SEQ ID NO: 312, SEQ ID NO: 313, SEQ ID NO: 314, SEQ ID NO: 315, SEQ ID NO: 316, SEQ ID NO: 317, SEQ ID NO: 318, SEQ ID NO: 319, SEQ ID NO: 320, SEQ ID NO: 321, SEQ ID NO: 322, SEQ ID NO: 323, SEQ ID NO: 324, SEQ ID NO: 325, SEQ ID NO: 326, SEQ ID NO: 327, SEQ ID NO: 328, SEQ ID NO: 329, SEQ ID NO: 330, SEQ ID NO: 331, SEQ ID NO: 332, SEQ ID NO: 333, SEQ ID NO: 334, SEQ ID NO: 335, SEQ ID NO: 336, SEQ ID NO: 337, SEQ ID NO: 338, SEQ ID NO: 339, SEQ ID NO: 340, SEQ ID NO: 341, SEQ ID NO: 342, SEQ ID NO: 343, SEQ ID NO: 344, SEQ ID NO: 345, SEQ ID NO: 346, SEQ ID NO: 347, SEQ ID NO: 348, or SEQ ID NO: 349.

[0440] In some examples of any of the ABPCs described herein, the first antigen-binding domain includes a light chain variable domain comprising SEQ ID NO: 364, and a heavy chain variable domain comprising: SEQ ID NO: 304, SEQ ID NO: 312, SEQ ID NO: 313, SEQ ID NO: 314, SEQ ID NO: 315, SEQ ID NO: 316, SEQ ID NO: 317, SEQ ID NO: 318, SEQ ID NO: 319, SEQ ID NO: 320, SEQ ID NO: 321, SEQ ID NO: 322, SEQ ID NO: 323, SEQ ID NO: 324, SEQ ID NO: 325, SEQ ID NO: 326, SEQ ID NO: 327, SEQ ID NO: 328, SEQ ID NO: 329, SEQ ID NO: 330, SEQ ID NO: 331, SEQ ID NO: 332, SEQ ID NO: 333, SEQ ID NO: 334, SEQ ID NO: 335, SEQ ID NO: 336, SEQ ID NO: 337, SEQ ID NO: 338, SEQ ID NO: 339, SEQ ID NO: 340, SEQ ID NO: 341, SEQ ID NO: 342, SEQ ID NO: 343, SEQ ID NO: 344, SEQ ID NO: 345, SEQ ID NO: 346, SEQ ID NO: 347, SEQ ID NO: 348, or SEQ ID NO: 349.

[0441] In some examples of any of the ABPCs described herein, the first antigen-binding domain includes a light chain variable domain comprising SEQ ID NO: 365, and a heavy chain variable domain comprising: SEQ ID NO: 304, SEQ ID NO: 312, SEQ ID NO: 313, SEQ ID NO: 314, SEQ ID NO: 315, SEQ ID NO: 316, SEQ ID NO: 317, SEQ ID NO: 318, SEQ ID NO: 319, SEQ ID NO: 320, SEQ ID NO: 321, SEQ ID NO: 322, SEQ ID NO: 323, SEQ ID NO: 324, SEQ ID NO: 325, SEQ ID NO: 326, SEQ ID NO: 327, SEQ ID NO: 328, SEQ ID NO: 329, SEQ ID NO: 330, SEQ ID NO: 331, SEQ ID NO: 332, SEQ ID NO: 333, SEQ ID NO: 334, SEQ ID NO: 335, SEQ ID NO: 336, SEQ ID NO: 337, SEQ ID NO: 338, SEQ ID NO: 339, SEQ ID NO: 340, SEQ ID NO: 341, SEQ ID NO: 342, SEQ ID NO: 343, SEQ ID NO: 344, SEQ ID NO: 345, SEQ ID NO: 346, SEQ ID NO: 347, SEQ ID NO: 348, or SEQ ID NO: 349.

[0442] In some examples of any of the ABPCs described herein, the first antigen-binding domain includes a light chain variable domain comprising SEQ ID NO: 366, and a heavy chain variable domain comprising: SEQ ID NO: 304, SEQ ID NO: 312, SEQ ID NO: 313, SEQ ID NO: 314, SEQ ID NO: 315, SEQ ID NO: 316, SEQ ID NO: 317, SEQ ID NO: 318, SEQ ID NO: 319, SEQ ID NO: 320, SEQ ID NO: 321, SEQ ID NO: 322, SEQ ID NO: 323, SEQ ID NO: 324, SEQ ID NO: 325, SEQ ID NO: 326, SEQ ID NO: 327, SEQ ID NO: 328, SEQ ID NO: 329, SEQ ID NO: 330, SEQ ID NO: 331, SEQ ID NO: 332, SEQ ID NO: 333, SEQ ID NO: 334, SEQ ID NO: 335, SEQ ID NO: 336, SEQ ID NO: 337, SEQ ID NO: 338, SEQ ID NO: 339, SEQ ID NO: 340, SEQ ID NO: 341, SEQ ID NO: 342, SEQ ID NO: 343, SEQ ID NO: 344, SEQ ID NO: 345, SEQ ID NO: 346, SEQ ID NO: 347, SEQ ID NO: 348, or SEQ ID NO: 349.

[0443] In some examples of any of the ABPCs described herein, the first antigen-binding domain includes a light chain variable domain comprising SEQ ID NO: 367, and a heavy chain variable domain comprising: SEQ ID NO: 304, SEQ ID NO: 312, SEQ ID NO: 313, SEQ ID NO: 314, SEQ ID NO: 315, SEQ ID NO: 316, SEQ ID NO: 317, SEQ ID NO: 318, SEQ ID NO: 319, SEQ ID NO: 320, SEQ ID NO: 321, SEQ ID NO: 322, SEQ ID NO: 323, SEQ ID NO: 324, SEQ ID NO: 325, SEQ ID NO: 326, SEQ ID NO: 327, SEQ ID NO: 328, SEQ ID NO: 329, SEQ ID NO: 330, SEQ ID NO: 331, SEQ ID NO: 332, SEQ ID NO: 333, SEQ ID NO: 334, SEQ ID NO: 335, SEQ ID NO: 336, SEQ ID NO: 337, SEQ ID NO: 338, SEQ ID NO: 339, SEQ ID NO: 340, SEQ ID NO: 341, SEQ ID NO: 342, SEQ ID NO: 343, SEQ ID NO: 344, SEQ ID NO: 345, SEQ ID NO: 346, SEQ ID NO: 347, SEQ ID NO: 348, or SEQ ID NO: 349.

[0444] In some examples of any of the ABPCs described herein, the first antigen-binding domain includes a light chain variable domain comprising SEQ ID NO: 368, and a heavy chain variable domain comprising: SEQ ID NO: 304, SEQ ID NO: 312, SEQ ID NO: 313, SEQ ID NO: 314, SEQ ID NO: 315, SEQ ID NO: 316, SEQ ID NO: 317, SEQ ID NO: 318, SEQ ID NO: 319, SEQ ID NO: 320, SEQ ID NO: 321, SEQ ID NO: 322, SEQ ID NO: 323, SEQ ID NO: 324, SEQ ID NO: 325, SEQ ID NO: 326, SEQ ID NO: 327, SEQ ID NO: 328, SEQ ID NO: 329, SEQ ID NO: 330, SEQ ID NO: 331, SEQ ID NO: 332, SEQ ID NO: 333, SEQ ID NO: 334, SEQ ID NO: 335, SEQ ID NO: 336, SEQ ID NO: 337, SEQ ID NO: 338, SEQ ID NO: 339, SEQ ID NO: 340, SEQ ID NO: 341, SEQ ID NO: 342, SEQ ID NO: 343, SEQ ID NO: 344, SEQ ID NO: 345, SEQ ID NO: 346, SEQ ID NO: 347, SEQ ID NO: 348, or SEQ ID NO: 349.

[0445] In some examples of any of the ABPCs described herein, the first antigen-binding domain includes a light chain variable domain comprising SEQ ID NO: 369, and a heavy chain variable domain comprising: SEQ ID NO: 304, SEQ ID NO: 312, SEQ ID NO: 313, SEQ ID NO: 314, SEQ ID NO: 315, SEQ ID NO: 316, SEQ ID NO: 317, SEQ ID NO: 318, SEQ ID NO: 319, SEQ ID NO: 320, SEQ ID NO: 321, SEQ ID NO: 322, SEQ ID NO: 323, SEQ ID NO: 324, SEQ ID NO: 325, SEQ ID NO: 326, SEQ ID NO: 327, SEQ ID NO: 328, SEQ ID NO: 329, SEQ ID NO: 330, SEQ ID NO: 331, SEQ ID NO: 332, SEQ ID NO: 333, SEQ ID NO: 334, SEQ ID NO: 335, SEQ ID NO: 336, SEQ ID NO: 337, SEQ ID NO: 338, SEQ ID NO: 339, SEQ ID NO: 340, SEQ ID NO: 341, SEQ ID NO: 342, SEQ ID NO: 343, SEQ ID NO: 344, SEQ ID NO: 345, SEQ ID NO: 346, SEQ ID NO: 347, SEQ ID NO: 348, or SEQ ID NO: 349.

[0446] In some examples of any of the ABPCs described herein, the first antigen-binding domain includes a light chain variable domain comprising SEQ ID NO: 370, and a heavy chain variable domain comprising: SEQ ID NO: 304, SEQ ID NO: 312, SEQ ID NO: 313, SEQ ID NO: 314, SEQ ID NO: 315, SEQ ID NO: 316, SEQ ID NO: 317, SEQ ID NO: 318, SEQ ID NO: 319, SEQ ID NO: 320, SEQ ID NO: 321, SEQ ID NO: 322, SEQ ID NO: 323, SEQ ID NO: 324, SEQ ID NO: 325, SEQ ID NO: 326, SEQ ID NO: 327, SEQ ID NO: 328, SEQ ID NO: 329, SEQ ID NO: 330, SEQ ID NO: 331, SEQ ID NO: 332, SEQ ID NO: 333, SEQ ID NO: 334, SEQ ID NO: 335, SEQ ID NO: 336, SEQ ID NO: 337, SEQ ID NO: 338, SEQ ID NO: 339, SEQ ID NO: 340, SEQ ID NO: 341, SEQ ID NO: 342, SEQ ID NO: 343, SEQ ID NO: 344, SEQ ID NO: 345, SEQ ID NO: 346, SEQ ID NO: 347, SEQ ID NO: 348, or SEQ ID NO: 349.

[0447] In some examples of any of the ABPCs described herein, the first antigen-binding domain includes a light chain variable domain comprising SEQ ID NO: 371, and a heavy chain variable domain comprising: SEQ ID NO: 304, SEQ ID NO: 312, SEQ ID NO: 313, SEQ ID NO: 314, SEQ ID NO: 315, SEQ ID NO: 316, SEQ ID NO: 317, SEQ ID NO: 318, SEQ ID NO: 319, SEQ ID NO: 320, SEQ ID NO: 321, SEQ ID NO: 322, SEQ ID NO: 323, SEQ ID NO: 324, SEQ ID NO: 325, SEQ ID NO: 326, SEQ ID NO: 327, SEQ ID NO: 328, SEQ ID NO: 329, SEQ ID NO: 330, SEQ ID NO: 331, SEQ ID NO: 332, SEQ ID NO: 333, SEQ ID NO: 334, SEQ ID NO: 335, SEQ ID NO: 336, SEQ ID NO: 337, SEQ ID NO: 338, SEQ ID NO: 339, SEQ ID NO: 340, SEQ ID NO: 341, SEQ ID NO: 342, SEQ ID NO: 343, SEQ ID NO: 344, SEQ ID NO: 345, SEQ ID NO: 346, SEQ ID NO: 347, SEQ ID NO: 348, or SEQ ID NO: 349.

[0448] In some examples of any of the ABPCs described herein, the first antigen-binding domain includes a light chain variable domain comprising SEQ ID NO: 372, and a heavy chain variable domain comprising: SEQ ID NO: 304, SEQ ID NO: 312, SEQ ID NO: 313, SEQ ID NO: 314, SEQ ID NO: 315, SEQ ID NO: 316, SEQ ID NO: 317, SEQ ID NO: 318, SEQ ID NO: 319, SEQ ID NO: 320, SEQ ID NO: 321, SEQ ID NO: 322, SEQ ID NO: 323, SEQ ID NO: 324, SEQ ID NO: 325, SEQ ID NO: 326, SEQ ID NO: 327, SEQ ID NO: 328, SEQ ID NO: 329, SEQ ID NO: 330, SEQ ID NO: 331, SEQ ID NO: 332, SEQ ID NO: 333, SEQ ID NO: 334, SEQ ID NO: 335, SEQ ID NO: 336, SEQ ID NO: 337, SEQ ID NO: 338, SEQ ID NO: 339, SEQ ID NO: 340, SEQ ID NO: 341, SEQ ID NO: 342, SEQ ID NO: 343, SEQ ID NO: 344, SEQ ID NO: 345, SEQ ID NO: 346, SEQ ID NO: 347, SEQ ID NO: 348, or SEQ ID NO: 349.

[0449] In some examples of any of the ABPCs described herein, the first antigen-binding domain includes a light chain variable domain comprising SEQ ID NO: 373, and a heavy chain variable domain comprising: SEQ ID NO: 304, SEQ ID NO: 312, SEQ ID NO: 313, SEQ ID NO: 314, SEQ ID NO: 315, SEQ ID NO: 316, SEQ ID NO: 317, SEQ ID NO: 318, SEQ ID NO: 319, SEQ ID NO: 320, SEQ ID NO: 321, SEQ ID NO: 322, SEQ ID NO: 323, SEQ ID NO: 324, SEQ ID NO: 325, SEQ ID NO: 326, SEQ ID NO: 327, SEQ ID NO: 328, SEQ ID NO: 329, SEQ ID NO: 330, SEQ ID NO: 331, SEQ ID NO: 332, SEQ ID NO: 333, SEQ ID NO: 334, SEQ ID NO: 335, SEQ ID NO: 336, SEQ ID NO: 337, SEQ ID NO: 338, SEQ ID NO: 339, SEQ ID NO: 340, SEQ ID NO: 341, SEQ ID NO: 342, SEQ ID NO: 343, SEQ ID NO: 344, SEQ ID NO: 345, SEQ ID NO: 346, SEQ ID NO: 347, SEQ ID NO: 348, or SEQ ID NO: 349.

[0450] In some examples of any of the ABPCs described herein, the first antigen-binding domain includes a light chain variable domain comprising SEQ ID NO: 374, and a heavy chain variable domain comprising: SEQ ID NO: 304, SEQ ID NO: 312, SEQ ID NO: 313, SEQ ID NO: 314, SEQ ID NO: 315, SEQ ID NO: 316, SEQ ID NO: 317, SEQ ID NO: 318, SEQ ID NO: 319, SEQ ID NO: 320, SEQ ID NO: 321, SEQ ID NO: 322, SEQ ID NO: 323, SEQ ID NO: 324, SEQ ID NO: 325, SEQ ID NO: 326, SEQ ID NO: 327, SEQ ID NO: 328, SEQ ID NO: 329, SEQ ID NO: 330, SEQ ID NO: 331, SEQ ID NO: 332, SEQ ID NO: 333, SEQ ID NO: 334, SEQ ID NO: 335, SEQ ID NO: 336, SEQ ID NO: 337, SEQ ID NO: 338, SEQ ID NO: 339, SEQ ID NO: 340, SEQ ID NO: 341, SEQ ID NO: 342, SEQ ID NO: 343, SEQ ID NO: 344, SEQ ID NO: 345, SEQ ID NO: 346, SEQ ID NO: 347, SEQ ID NO: 348, or SEQ ID NO: 349.

[0451] In some examples of any of the ABPCs described herein, the first antigen-binding domain includes a light chain variable domain comprising SEQ ID NO: 375, and a heavy chain variable domain comprising: SEQ ID NO: 304, SEQ ID NO: 312, SEQ ID NO: 313, SEQ ID NO: 314, SEQ ID NO: 315, SEQ ID NO: 316, SEQ ID NO: 317, SEQ ID NO: 318, SEQ ID NO: 319, SEQ ID NO: 320, SEQ ID NO: 321, SEQ ID NO: 322, SEQ ID NO: 323, SEQ ID NO: 324, SEQ ID NO: 325, SEQ ID NO: 326, SEQ ID NO: 327, SEQ ID NO: 328, SEQ ID NO: 329, SEQ ID NO: 330, SEQ ID NO: 331, SEQ ID NO: 332, SEQ ID NO: 333, SEQ ID NO: 334, SEQ ID NO: 335, SEQ ID NO: 336, SEQ ID NO: 337, SEQ ID NO: 338, SEQ ID NO: 339, SEQ ID NO: 340, SEQ ID NO: 341, SEQ ID NO: 342, SEQ ID NO: 343, SEQ ID NO: 344, SEQ ID NO: 345, SEQ ID NO: 346, SEQ ID NO: 347, SEQ ID NO: 348, or SEQ ID NO: 349.

[0452] In some examples of any of the ABPCs described herein, the first antigen-binding domain includes a light chain variable domain comprising SEQ ID NO: 376, and a heavy chain variable domain comprising: SEQ ID NO: 304, SEQ ID NO: 312, SEQ ID NO: 313, SEQ ID NO: 314, SEQ ID NO: 315, SEQ ID NO: 316, SEQ ID NO: 317, SEQ ID NO: 318, SEQ ID NO: 319, SEQ ID NO: 320, SEQ ID NO: 321, SEQ ID NO: 322, SEQ ID NO: 323, SEQ ID NO: 324, SEQ ID NO: 325, SEQ ID NO: 326, SEQ ID NO: 327, SEQ ID NO: 328, SEQ ID NO: 329, SEQ ID NO: 330, SEQ ID NO: 331, SEQ ID NO: 332, SEQ ID NO: 333, SEQ ID NO: 334, SEQ ID NO: 335, SEQ ID NO: 336, SEQ ID NO: 337, SEQ ID NO: 338, SEQ ID NO: 339, SEQ ID NO: 340, SEQ ID NO: 341, SEQ ID NO: 342, SEQ ID NO: 343, SEQ ID NO: 344, SEQ ID NO: 345, SEQ ID NO: 346, SEQ ID NO: 347, SEQ ID NO: 348, or SEQ ID NO: 349.

[0453] In some examples of any of the ABPCs described herein, the first antigen-binding domain includes a light chain variable domain comprising SEQ ID NO: 377, and a heavy chain variable domain comprising: SEQ ID NO: 304, SEQ ID NO: 312, SEQ ID NO: 313, SEQ ID NO: 314, SEQ ID NO: 315, SEQ ID NO: 316, SEQ ID NO: 317, SEQ ID NO: 318, SEQ ID NO: 319, SEQ ID NO: 320, SEQ ID NO: 321, SEQ ID NO: 322, SEQ ID NO: 323, SEQ ID NO: 324, SEQ ID NO: 325, SEQ ID NO: 326, SEQ ID NO: 327, SEQ ID NO: 328, SEQ ID NO: 329, SEQ ID NO: 330, SEQ ID NO: 331, SEQ ID NO: 332, SEQ ID NO: 333, SEQ ID NO: 334, SEQ ID NO: 335, SEQ ID NO: 336, SEQ ID NO: 337, SEQ ID NO: 338, SEQ ID NO: 339, SEQ ID NO: 340, SEQ ID NO: 341, SEQ ID NO: 342, SEQ ID NO: 343, SEQ ID NO: 344, SEQ ID NO: 345, SEQ ID NO: 346, SEQ ID NO: 347, SEQ ID NO: 348, or SEQ ID NO: 349.

[0454] In some examples of any of the ABPCs described herein, the first antigen-binding domain includes a light chain variable domain comprising SEQ ID NO: 378, and a heavy chain variable domain comprising: SEQ ID NO: 304, SEQ ID NO: 312, SEQ ID NO: 313, SEQ ID NO: 314, SEQ ID NO: 315, SEQ ID NO: 316, SEQ ID NO: 317, SEQ ID NO: 318, SEQ ID NO: 319, SEQ ID NO: 320, SEQ ID NO: 321, SEQ ID NO: 322, SEQ ID NO: 323, SEQ ID NO: 324, SEQ ID NO: 325, SEQ ID NO: 326, SEQ ID NO: 327, SEQ ID NO: 328, SEQ ID NO: 329, SEQ ID NO: 330, SEQ ID NO: 331, SEQ ID NO: 332, SEQ ID NO: 333, SEQ ID NO: 334, SEQ ID NO: 335, SEQ ID NO: 336, SEQ ID NO: 337, SEQ ID NO: 338, SEQ ID NO: 339, SEQ ID NO: 340, SEQ ID NO: 341, SEQ ID NO: 342, SEQ ID NO: 343, SEQ ID NO: 344, SEQ ID NO: 345, SEQ ID NO: 346, SEQ ID NO: 347, SEQ ID NO: 348, or SEQ ID NO: 349.

[0455] In some examples of any of the ABPCs described herein, the first antigen-binding domain includes a light chain variable domain comprising SEQ ID NO: 379, and a heavy chain variable domain comprising: SEQ ID NO: 304, SEQ ID NO: 312, SEQ ID NO: 313, SEQ ID NO: 314, SEQ ID NO: 315, SEQ ID NO: 316, SEQ ID NO: 317, SEQ ID NO: 318, SEQ ID NO: 319, SEQ ID NO: 320, SEQ ID NO: 321, SEQ ID NO: 322, SEQ ID NO: 323, SEQ ID NO: 324, SEQ ID NO: 325, SEQ ID NO: 326, SEQ ID NO: 327, SEQ ID NO: 328, SEQ ID NO: 329, SEQ ID NO: 330, SEQ ID NO: 331, SEQ ID NO: 332, SEQ ID NO: 333, SEQ ID NO: 334, SEQ ID NO: 335, SEQ ID NO: 336, SEQ ID NO: 337, SEQ ID NO: 338, SEQ ID NO: 339, SEQ ID NO: 340, SEQ ID NO: 341, SEQ ID NO: 342, SEQ ID NO: 343, SEQ ID NO: 344, SEQ ID NO: 345, SEQ ID NO: 346, SEQ ID NO: 347, SEQ ID NO: 348, or SEQ ID NO: 349.

[0456] In some examples of any of the ABPCs described herein, the first antigen-binding domain includes a light chain variable domain comprising SEQ ID NO: 380, and a heavy chain variable domain comprising: SEQ ID NO: 304, SEQ ID NO: 312, SEQ ID NO: 313, SEQ ID NO: 314, SEQ ID NO: 315, SEQ ID NO: 316, SEQ ID NO: 317, SEQ ID NO: 318, SEQ ID NO: 319, SEQ ID NO: 320, SEQ ID NO: 321, SEQ ID NO: 322, SEQ ID NO: 323, SEQ ID NO: 324, SEQ ID NO: 325, SEQ ID NO: 326, SEQ ID NO: 327, SEQ ID NO: 328, SEQ ID NO: 329, SEQ ID NO: 330, SEQ ID NO: 331, SEQ ID NO: 332, SEQ ID NO: 333, SEQ ID NO: 334, SEQ ID NO: 335, SEQ ID NO: 336, SEQ ID NO: 337, SEQ ID NO: 338, SEQ ID NO: 339, SEQ ID NO: 340, SEQ ID NO: 341, SEQ ID NO: 342, SEQ ID NO: 343, SEQ ID NO: 344, SEQ ID NO: 345, SEQ ID NO: 346, SEQ ID NO: 347, SEQ ID NO: 348, or SEQ ID NO: 349.

[0457] In some examples of any of the ABPCs described herein, the first antigen-binding domain includes a heavy chain variable domain comprising: SEQ ID NO: 381, SEQ ID NO: 382, SEQ ID NO: 383, SEQ ID NO: 384, SEQ ID NO: 385, SEQ ID NO: 386, SEQ ID NO: 387, SEQ ID NO: 388, SEQ ID NO: 389, SEQ ID NO: 390, SEQ ID NO: 391, SEQ ID NO: 392, SEQ ID NO: 393, SEQ ID NO: 394, SEQ ID NO: 395, SEQ ID NO: 396, SEQ ID NO: 397, SEQ ID NO: 398, SEQ ID NO: 399, SEQ ID NO: 400, SEQ ID NO: 401, SEQ ID NO: 402, SEQ ID NO: 403, SEQ ID NO: 404, SEQ ID NO: 405, SEQ ID NO: 406, SEQ ID NO: 407, SEQ ID NO: 408, SEQ ID NO: 409, SEQ ID NO: 410, SEQ ID NO: 411, SEQ ID NO: 412, SEQ ID NO: 413, SEQ ID NO: 414, SEQ ID NO: 415, SEQ ID NO: 416, SEQ ID NO: 417, SEQ ID NO: 418, SEQ ID NO: 419, SEQ ID NO: 420, SEQ ID NO: 421, SEQ ID NO: 422, SEQ ID NO: 423, SEQ ID NO: 424, or SEQ ID NO: 425.

[0458] In some examples of any of the ABPCs described herein, the first antigen-binding domain includes a light chain variable domain comprising SEQ ID NO: 305, and a heavy chain variable domain comprising SEQ ID NO: 381, SEQ ID NO: 382, SEQ ID NO: 383, SEQ ID NO: 384, SEQ ID NO: 385, SEQ ID NO: 386, SEQ ID NO: 387, SEQ ID NO: 388, SEQ ID NO: 389, SEQ ID NO: 390, SEQ ID NO: 391, SEQ ID NO: 392, SEQ ID NO: 393, SEQ ID NO: 394, SEQ ID NO: 395, SEQ ID NO: 396, SEQ ID NO: 397, SEQ ID NO: 398, SEQ ID NO: 399, SEQ ID NO: 400, SEQ ID NO: 401, SEQ ID NO: 402, SEQ ID NO: 403, SEQ ID NO: 404, SEQ ID NO: 405, SEQ ID NO: 406, SEQ ID NO: 407, SEQ ID NO: 408, SEQ ID NO: 409, SEQ ID NO: 410, SEQ ID NO: 411, SEQ ID NO: 412, SEQ ID NO: 413, SEQ ID NO: 414, SEQ ID NO: 415, SEQ ID NO: 416, SEQ ID NO: 417, SEQ ID NO: 418, SEQ ID NO: 419, SEQ ID NO: 420, SEQ ID NO: 421, SEQ ID NO: 422, SEQ ID NO: 423, SEQ ID NO: 424, or SEQ ID NO: 425.

[0459] In some examples of any of the ABPCs described herein, the first antigen-binding domain includes a light chain variable domain comprising SEQ ID NO: 350, and a heavy chain variable domain comprising SEQ ID NO: 381, SEQ ID NO: 382, SEQ ID NO: 383, SEQ ID NO: 384, SEQ ID NO: 385, SEQ ID NO: 386, SEQ ID NO: 387, SEQ ID NO: 388, SEQ ID NO: 389, SEQ ID NO: 390, SEQ ID NO: 391, SEQ ID NO: 392, SEQ ID NO: 393, SEQ ID NO: 394, SEQ ID NO: 395, SEQ ID NO: 396, SEQ ID NO: 397, SEQ ID NO: 398, SEQ ID NO: 399, SEQ ID NO: 400, SEQ ID NO: 401, SEQ ID NO: 402, SEQ ID NO: 403, SEQ ID NO: 404, SEQ ID NO: 405, SEQ ID NO: 406, SEQ ID NO: 407, SEQ ID NO: 408, SEQ ID NO: 409, SEQ ID NO: 410, SEQ ID NO: 411, SEQ ID NO: 412, SEQ ID NO: 413, SEQ ID NO: 414, SEQ ID NO: 415, SEQ ID NO: 416, SEQ ID NO: 417, SEQ ID NO: 418, SEQ ID NO: 419, SEQ ID NO: 420, SEQ ID NO: 421, SEQ ID NO: 422, SEQ ID NO: 423, SEQ ID NO: 424, or SEQ ID NO: 425.

[0460] In some examples of any of the ABPCs described herein, the first antigen-binding domain includes a light chain variable domain comprising SEQ ID NO: 351, and a heavy chain variable domain comprising SEQ ID NO: 381, SEQ ID NO: 382, SEQ ID NO: 383, SEQ ID NO: 384, SEQ ID NO: 385, SEQ ID NO: 386, SEQ ID NO: 387, SEQ ID NO: 388, SEQ ID NO: 389, SEQ ID NO: 390, SEQ ID NO: 391, SEQ ID NO: 392, SEQ ID NO: 393, SEQ ID NO: 394, SEQ ID NO: 395, SEQ ID NO: 396, SEQ ID NO: 397, SEQ ID NO: 398, SEQ ID NO: 399, SEQ ID NO: 400, SEQ ID NO: 401, SEQ ID NO: 402, SEQ ID NO: 403, SEQ ID NO: 404, SEQ ID NO: 405, SEQ ID NO: 406, SEQ ID NO: 407, SEQ ID NO: 408, SEQ ID NO: 409, SEQ ID NO: 410, SEQ ID NO: 411, SEQ ID NO: 412, SEQ ID NO: 413, SEQ ID NO: 414, SEQ ID NO: 415, SEQ ID NO: 416, SEQ ID NO: 417, SEQ ID NO: 418, SEQ ID NO: 419, SEQ ID NO: 420, SEQ ID NO: 421, SEQ ID NO: 422, SEQ ID NO: 423, SEQ ID NO: 424, or SEQ ID NO: 425.

[0461] In some examples of any of the ABPCs described herein, the first antigen-binding domain includes a light chain variable domain comprising SEQ ID NO: 352, and a heavy chain variable domain comprising SEQ ID NO: 381, SEQ ID NO: 382, SEQ ID NO: 383, SEQ ID NO: 384, SEQ ID NO: 385, SEQ ID NO: 386, SEQ ID NO: 387, SEQ ID NO: 388, SEQ ID NO: 389, SEQ ID NO: 390, SEQ ID NO: 391, SEQ ID NO: 392, SEQ ID NO: 393, SEQ ID NO: 394, SEQ ID NO: 395, SEQ ID NO: 396, SEQ ID NO: 397, SEQ ID NO: 398, SEQ ID NO: 399, SEQ ID NO: 400, SEQ ID NO: 401, SEQ ID NO: 402, SEQ ID NO: 403, SEQ ID NO: 404, SEQ ID NO: 405, SEQ ID NO: 406, SEQ ID NO: 407, SEQ ID NO: 408, SEQ ID NO: 409, SEQ ID NO: 410, SEQ ID NO: 411, SEQ ID NO: 412, SEQ ID NO: 413, SEQ ID NO: 414, SEQ ID NO: 415, SEQ ID NO: 416, SEQ ID NO: 417, SEQ ID NO: 418, SEQ ID NO: 419, SEQ ID NO: 420, SEQ ID NO: 421, SEQ ID NO: 422, SEQ ID NO: 423, SEQ ID NO: 424, or SEQ ID NO: 425.

[0462] In some examples of any of the ABPCs described herein, the first antigen-binding domain includes a light chain variable domain comprising SEQ ID NO: 353, and a heavy chain variable domain comprising SEQ ID NO: 381, SEQ ID NO: 382, SEQ ID NO: 383, SEQ ID NO: 384, SEQ ID NO: 385, SEQ ID NO: 386, SEQ ID NO: 387, SEQ ID NO: 388, SEQ ID NO: 389, SEQ ID NO: 390, SEQ ID NO: 391, SEQ ID NO: 392, SEQ ID NO: 393, SEQ ID NO: 394, SEQ ID NO: 395, SEQ ID NO: 396, SEQ ID NO: 397, SEQ ID NO: 398, SEQ ID NO: 399, SEQ ID NO: 400, SEQ ID NO: 401, SEQ ID NO: 402, SEQ ID NO: 403, SEQ ID NO: 404, SEQ ID NO: 405, SEQ ID NO: 406, SEQ ID NO: 407, SEQ ID NO: 408, SEQ ID NO: 409, SEQ ID NO: 410, SEQ ID NO: 411, SEQ ID NO: 412, SEQ ID NO: 413, SEQ ID NO: 414, SEQ ID NO: 415, SEQ ID NO: 416, SEQ ID NO: 417, SEQ ID NO: 418, SEQ ID NO: 419, SEQ ID NO: 420, SEQ ID NO: 421, SEQ ID NO: 422, SEQ ID NO: 423, SEQ ID NO: 424, or SEQ ID NO: 425.

[0463] In some examples of any of the ABPCs described herein, the first antigen-binding domain includes a light chain variable domain comprising SEQ ID NO: 354, and a heavy chain variable domain comprising SEQ ID NO: 381, SEQ ID NO: 382, SEQ ID NO: 383, SEQ ID NO: 384, SEQ ID NO: 385, SEQ ID NO: 386, SEQ ID NO: 387, SEQ ID NO: 388, SEQ ID NO: 389, SEQ ID NO: 390, SEQ ID NO: 391, SEQ ID NO: 392, SEQ ID NO: 393, SEQ ID NO: 394, SEQ ID NO: 395, SEQ ID NO: 396, SEQ ID NO: 397, SEQ ID NO: 398, SEQ ID NO: 399, SEQ ID NO: 400, SEQ ID NO: 401, SEQ ID NO: 402, SEQ ID NO: 403, SEQ ID NO: 404, SEQ ID NO: 405, SEQ ID NO: 406, SEQ ID NO: 407, SEQ ID NO: 408, SEQ ID NO: 409, SEQ ID NO: 410, SEQ ID NO: 411, SEQ ID NO: 412, SEQ ID NO: 413, SEQ ID NO: 414, SEQ ID NO: 415, SEQ ID NO: 416, SEQ ID NO: 417, SEQ ID NO: 418, SEQ ID NO: 419, SEQ ID NO: 420, SEQ ID NO: 421, SEQ ID NO: 422, SEQ ID NO: 423, SEQ ID NO: 424, or SEQ ID NO: 425.

[0464] In some examples of any of the ABPCs described herein, the first antigen-binding domain includes a light chain variable domain comprising SEQ ID NO: 355, and a heavy chain variable domain comprising SEQ ID NO: 381, SEQ ID NO: 382, SEQ ID NO: 383, SEQ ID NO: 384, SEQ ID NO: 385, SEQ ID NO: 386, SEQ ID NO: 387, SEQ ID NO: 388, SEQ ID NO: 389, SEQ ID NO: 390, SEQ ID NO: 391, SEQ ID NO: 392, SEQ ID NO: 393, SEQ ID NO: 394, SEQ ID NO: 395, SEQ ID NO: 396, SEQ ID NO: 397, SEQ ID NO: 398, SEQ ID NO: 399, SEQ ID NO: 400, SEQ ID NO: 401, SEQ ID NO: 402, SEQ ID NO: 403, SEQ ID NO: 404, SEQ ID NO: 405, SEQ ID NO: 406, SEQ ID NO: 407, SEQ ID NO: 408, SEQ ID NO: 409, SEQ ID NO: 410, SEQ ID NO: 411, SEQ ID NO: 412, SEQ ID NO: 413, SEQ ID NO: 414, SEQ ID NO: 415, SEQ ID NO: 416, SEQ ID NO: 417, SEQ ID NO: 418, SEQ ID NO: 419, SEQ ID NO: 420, SEQ ID NO: 421, SEQ ID NO: 422, SEQ ID NO: 423, SEQ ID NO: 424, or SEQ ID NO: 425.

[0465] In some examples of any of the ABPCs described herein, the first antigen-binding domain includes a light chain variable domain comprising SEQ ID NO: 356, and a heavy chain variable domain comprising SEQ ID NO: 381, SEQ ID NO: 382, SEQ ID NO: 383, SEQ ID NO: 384, SEQ ID NO: 385, SEQ ID NO: 386, SEQ ID NO: 387, SEQ ID NO: 388, SEQ ID NO: 389, SEQ ID NO: 390, SEQ ID NO: 391, SEQ ID NO: 392, SEQ ID NO: 393, SEQ ID NO: 394, SEQ ID NO: 395, SEQ ID NO: 396, SEQ ID NO: 397, SEQ ID NO: 398, SEQ ID NO: 399, SEQ ID NO: 400, SEQ ID NO: 401, SEQ ID NO: 402, SEQ ID NO: 403, SEQ ID NO: 404, SEQ ID NO: 405, SEQ ID NO: 406, SEQ ID NO: 407, SEQ ID NO: 408, SEQ ID NO: 409, SEQ ID NO: 410, SEQ ID NO: 411, SEQ ID NO: 412, SEQ ID NO: 413, SEQ ID NO: 414, SEQ ID NO: 415, SEQ ID NO: 416, SEQ ID NO: 417, SEQ ID NO: 418, SEQ ID NO: 419, SEQ ID NO: 420, SEQ ID NO: 421, SEQ ID NO: 422, SEQ ID NO: 423, SEQ ID NO: 424, or SEQ ID NO: 425.

[0466] In some examples of any of the ABPCs described herein, the first antigen-binding domain includes a light chain variable domain comprising SEQ ID NO: 357, and a heavy chain variable domain comprising SEQ ID NO: 381, SEQ ID NO: 382, SEQ ID NO: 383, SEQ ID NO: 384, SEQ ID NO: 385, SEQ ID NO: 386, SEQ ID NO: 387, SEQ ID NO: 388, SEQ ID NO: 389, SEQ ID NO: 390, SEQ ID NO: 391, SEQ ID NO: 392, SEQ ID NO: 393, SEQ ID NO: 394, SEQ ID NO: 395, SEQ ID NO: 396, SEQ ID NO: 397, SEQ ID NO: 398, SEQ ID NO: 399, SEQ ID NO: 400, SEQ ID NO: 401, SEQ ID NO: 402, SEQ ID NO: 403, SEQ ID NO: 404, SEQ ID NO: 405, SEQ ID NO: 406, SEQ ID NO: 407, SEQ ID NO: 408, SEQ ID NO: 409, SEQ ID NO: 410, SEQ ID NO: 411, SEQ ID NO: 412, SEQ ID NO: 413, SEQ ID NO: 414, SEQ ID NO: 415, SEQ ID NO: 416, SEQ ID NO: 417, SEQ ID NO: 418, SEQ ID NO: 419, SEQ ID NO: 420, SEQ ID NO: 421, SEQ ID NO: 422, SEQ ID NO: 423, SEQ ID NO: 424, or SEQ ID NO: 425.

[0467] In some examples of any of the ABPCs described herein, the first antigen-binding domain includes a light chain variable domain comprising SEQ ID NO: 358, and a heavy chain variable domain comprising SEQ ID NO: 381, SEQ ID NO: 382, SEQ ID NO: 383, SEQ ID NO: 384, SEQ ID NO: 385, SEQ ID NO: 386, SEQ ID NO: 387, SEQ ID NO: 388, SEQ ID NO: 389, SEQ ID NO: 390, SEQ ID NO: 391, SEQ ID NO: 392, SEQ ID NO: 393, SEQ ID NO: 394, SEQ ID NO: 395, SEQ ID NO: 396, SEQ ID NO: 397, SEQ ID NO: 398, SEQ ID NO: 399, SEQ ID NO: 400, SEQ ID NO: 401, SEQ ID NO: 402, SEQ ID NO: 403, SEQ ID NO: 404, SEQ ID NO: 405, SEQ ID NO: 406, SEQ ID NO: 407, SEQ ID NO: 408, SEQ ID NO: 409, SEQ ID NO: 410, SEQ ID NO: 411, SEQ ID NO: 412, SEQ ID NO: 413, SEQ ID NO: 414, SEQ ID NO: 415, SEQ ID NO: 416, SEQ ID NO: 417, SEQ ID NO: 418, SEQ ID NO: 419, SEQ ID NO: 420, SEQ ID NO: 421, SEQ ID NO: 422, SEQ ID NO: 423, SEQ ID NO: 424, or SEQ ID NO: 425.

[0468] In some examples of any of the ABPCs described herein, the first antigen-binding domain includes a light chain variable domain comprising SEQ ID NO: 359, and a heavy chain variable domain comprising SEQ ID NO: 381, SEQ ID NO: 382, SEQ ID NO: 383, SEQ ID NO: 384, SEQ ID NO: 385, SEQ ID NO: 386, SEQ ID NO: 387, SEQ ID NO: 388, SEQ ID NO: 389, SEQ ID NO: 390, SEQ ID NO: 391, SEQ ID NO: 392, SEQ ID NO: 393, SEQ ID NO: 394, SEQ ID NO: 395, SEQ ID NO: 396, SEQ ID NO: 397, SEQ ID NO: 398, SEQ ID NO: 399, SEQ ID NO: 400, SEQ ID NO: 401, SEQ ID NO: 402, SEQ ID NO: 403, SEQ ID NO: 404, SEQ ID NO: 405, SEQ ID NO: 406, SEQ ID NO: 407, SEQ ID NO: 408, SEQ ID NO: 409, SEQ ID NO: 410, SEQ ID NO: 411, SEQ ID NO: 412, SEQ ID NO: 413, SEQ ID NO: 414, SEQ ID NO: 415, SEQ ID NO: 416, SEQ ID NO: 417, SEQ ID NO: 418, SEQ ID NO: 419, SEQ ID NO: 420, SEQ ID NO: 421, SEQ ID NO: 422, SEQ ID NO: 423, SEQ ID NO: 424, or SEQ ID NO: 425.

[0469] In some examples of any of the ABPCs described herein, the first antigen-binding domain includes a light chain variable domain comprising SEQ ID NO: 360, and a heavy chain variable domain comprising SEQ ID NO: 381, SEQ ID NO: 382, SEQ ID NO: 383, SEQ ID NO: 384, SEQ ID NO: 385, SEQ ID NO: 386, SEQ ID NO: 387, SEQ ID NO: 388, SEQ ID NO: 389, SEQ ID NO: 390, SEQ ID NO: 391, SEQ ID NO: 392, SEQ ID NO: 393, SEQ ID NO: 394, SEQ ID NO: 395, SEQ ID NO: 396, SEQ ID NO: 397, SEQ ID NO: 398, SEQ ID NO: 399, SEQ ID NO: 400, SEQ ID NO: 401, SEQ ID NO: 402, SEQ ID NO: 403, SEQ ID NO: 404, SEQ ID NO: 405, SEQ ID NO: 406, SEQ ID NO: 407, SEQ ID NO: 408, SEQ ID NO: 409, SEQ ID NO: 410, SEQ ID NO: 411, SEQ ID NO: 412, SEQ ID NO: 413, SEQ ID NO: 414, SEQ ID NO: 415, SEQ ID NO: 416, SEQ ID NO: 417, SEQ ID NO: 418, SEQ ID NO: 419, SEQ ID NO: 420, SEQ ID NO: 421, SEQ ID NO: 422, SEQ ID NO: 423, SEQ ID NO: 424, or SEQ ID NO: 425.

[0470] In some examples of any of the ABPCs described herein, the first antigen-binding domain includes a light chain variable domain comprising SEQ ID NO: 361, and a heavy chain variable domain comprising SEQ ID NO: 381, SEQ ID NO: 382, SEQ ID NO: 383, SEQ ID NO: 384, SEQ ID NO: 385, SEQ ID NO: 386, SEQ ID NO: 387, SEQ ID NO: 388, SEQ ID NO: 389, SEQ ID NO: 390, SEQ ID NO: 391, SEQ ID NO: 392, SEQ ID NO: 393, SEQ ID NO: 394, SEQ ID NO: 395, SEQ ID NO: 396, SEQ ID NO: 397, SEQ ID NO: 398, SEQ ID NO: 399, SEQ ID NO: 400, SEQ ID NO: 401, SEQ ID NO: 402, SEQ ID NO: 403, SEQ ID NO: 404, SEQ ID NO: 405, SEQ ID NO: 406, SEQ ID NO: 407, SEQ ID NO: 408, SEQ ID NO: 409, SEQ ID NO: 410, SEQ ID NO: 411, SEQ ID NO: 412, SEQ ID NO: 413, SEQ ID NO: 414, SEQ ID NO: 415, SEQ ID NO: 416, SEQ ID NO: 417, SEQ ID NO: 418, SEQ ID NO: 419, SEQ ID NO: 420, SEQ ID NO: 421, SEQ ID NO: 422, SEQ ID NO: 423, SEQ ID NO: 424, or SEQ ID NO: 425.

[0471] In some examples of any of the ABPCs described herein, the first antigen-binding domain includes a light chain variable domain comprising SEQ ID NO: 362, and a heavy chain variable domain comprising SEQ ID NO: 381, SEQ ID NO: 382, SEQ ID NO: 383, SEQ ID NO: 384, SEQ ID NO: 385, SEQ ID NO: 386, SEQ ID NO: 387, SEQ ID NO: 388, SEQ ID NO: 389, SEQ ID NO: 390, SEQ ID NO: 391, SEQ ID NO: 392, SEQ ID NO: 393, SEQ ID NO: 394, SEQ ID NO: 395, SEQ ID NO: 396, SEQ ID NO: 397, SEQ ID NO: 398, SEQ ID NO: 399, SEQ ID NO: 400, SEQ ID NO: 401, SEQ ID NO: 402, SEQ ID NO: 403, SEQ ID NO: 404, SEQ ID NO: 405, SEQ ID NO: 406, SEQ ID NO: 407, SEQ ID NO: 408, SEQ ID NO: 409, SEQ ID NO: 410, SEQ ID NO: 411, SEQ ID NO: 412, SEQ ID NO: 413, SEQ ID NO: 414, SEQ ID NO: 415, SEQ ID NO: 416, SEQ ID NO: 417, SEQ ID NO: 418, SEQ ID NO: 419, SEQ ID NO: 420, SEQ ID NO: 421, SEQ ID NO: 422, SEQ ID NO: 423, SEQ ID NO: 424, or SEQ ID NO: 425.

[0472] In some examples of any of the ABPCs described herein, the first antigen-binding domain includes a light chain variable domain comprising SEQ ID NO: 363, and a heavy chain variable domain comprising SEQ ID NO: 381, SEQ ID NO: 382, SEQ ID NO: 383, SEQ ID NO: 384, SEQ ID NO: 385, SEQ ID NO: 386, SEQ ID NO: 387, SEQ ID NO: 388, SEQ ID NO: 389, SEQ ID NO: 390, SEQ ID NO: 391, SEQ ID NO: 392, SEQ ID NO: 393, SEQ ID NO: 394, SEQ ID NO: 395, SEQ ID NO: 396, SEQ ID NO: 397, SEQ ID NO: 398, SEQ ID NO: 399, SEQ ID NO: 400, SEQ ID NO: 401, SEQ ID NO: 402, SEQ ID NO: 403, SEQ ID NO: 404, SEQ ID NO: 405, SEQ ID NO: 406, SEQ ID NO: 407, SEQ ID NO: 408, SEQ ID NO: 409, SEQ ID NO: 410, SEQ ID NO: 411, SEQ ID NO: 412, SEQ ID NO: 413, SEQ ID NO: 414, SEQ ID NO: 415, SEQ ID NO: 416, SEQ ID NO: 417, SEQ ID NO: 418, SEQ ID NO: 419, SEQ ID NO: 420, SEQ ID NO: 421, SEQ ID NO: 422, SEQ ID NO: 423, SEQ ID NO: 424, or SEQ ID NO: 425.

[0473] In some examples of any of the ABPCs described herein, the first antigen-binding domain includes a light chain variable domain comprising SEQ ID NO: 364, and a heavy chain variable domain comprising SEQ ID NO: 381, SEQ ID NO: 382, SEQ ID NO: 383, SEQ ID NO: 384, SEQ ID NO: 385, SEQ ID NO: 386, SEQ ID NO: 387, SEQ ID NO: 388, SEQ ID NO: 389, SEQ ID NO: 390, SEQ ID NO: 391, SEQ ID NO: 392, SEQ ID NO: 393, SEQ ID NO: 394, SEQ ID NO: 395, SEQ ID NO: 396, SEQ ID NO: 397, SEQ ID NO: 398, SEQ ID NO: 399, SEQ ID NO: 400, SEQ ID NO: 401, SEQ ID NO: 402, SEQ ID NO: 403, SEQ ID NO: 404, SEQ ID NO: 405, SEQ ID NO: 406, SEQ ID NO: 407, SEQ ID NO: 408, SEQ ID NO: 409, SEQ ID NO: 410, SEQ ID NO: 411, SEQ ID NO: 412, SEQ ID NO: 413, SEQ ID NO: 414, SEQ ID NO: 415, SEQ ID NO: 416, SEQ ID NO: 417, SEQ ID NO: 418, SEQ ID NO: 419, SEQ ID NO: 420, SEQ ID NO: 421, SEQ ID NO: 422, SEQ ID NO: 423, SEQ ID NO: 424, or SEQ ID NO: 425.

[0474] In some examples of any of the ABPCs described herein, the first antigen-binding domain includes a light chain variable domain comprising SEQ ID NO: 365, and a heavy chain variable domain comprising SEQ ID NO: 381, SEQ ID NO: 382, SEQ ID NO: 383, SEQ ID NO: 384, SEQ ID NO: 385, SEQ ID NO: 386, SEQ ID NO: 387, SEQ ID NO: 388, SEQ ID NO: 389, SEQ ID NO: 390, SEQ ID NO: 391, SEQ ID NO: 392, SEQ ID NO: 393, SEQ ID NO: 394, SEQ ID NO: 395, SEQ ID NO: 396, SEQ ID NO: 397, SEQ ID NO: 398, SEQ ID NO: 399, SEQ ID NO: 400, SEQ ID NO: 401, SEQ ID NO: 402, SEQ ID NO: 403, SEQ ID NO: 404, SEQ ID NO: 405, SEQ ID NO: 406, SEQ ID NO: 407, SEQ ID NO: 408, SEQ ID NO: 409, SEQ ID NO: 410, SEQ ID NO: 411, SEQ ID NO: 412, SEQ ID NO: 413, SEQ ID NO: 414, SEQ ID NO: 415, SEQ ID NO: 416, SEQ ID NO: 417, SEQ ID NO: 418, SEQ ID NO: 419, SEQ ID NO: 420, SEQ ID NO: 421, SEQ ID NO: 422, SEQ ID NO: 423, SEQ ID NO: 424, or SEQ ID NO: 425.

[0475] In some examples of any of the ABPCs described herein, the first antigen-binding domain includes a light chain variable domain comprising SEQ ID NO: 366, and a heavy chain variable domain comprising SEQ ID NO: 381, SEQ ID NO: 382, SEQ ID NO: 383, SEQ ID NO: 384, SEQ ID NO: 385, SEQ ID NO: 386, SEQ ID NO: 387, SEQ ID NO: 388, SEQ ID NO: 389, SEQ ID NO: 390, SEQ ID NO: 391, SEQ ID NO: 392, SEQ ID NO: 393, SEQ ID NO: 394, SEQ ID NO: 395, SEQ ID NO: 396, SEQ ID NO: 397, SEQ ID NO: 398, SEQ ID NO: 399, SEQ ID NO: 400, SEQ ID NO: 401, SEQ ID NO: 402, SEQ ID NO: 403, SEQ ID NO: 404, SEQ ID NO: 405, SEQ ID NO: 406, SEQ ID NO: 407, SEQ ID NO: 408, SEQ ID NO: 409, SEQ ID NO: 410, SEQ ID NO: 411, SEQ ID NO: 412, SEQ ID NO: 413, SEQ ID NO: 414, SEQ ID NO: 415, SEQ ID NO: 416, SEQ ID NO: 417, SEQ ID NO: 418, SEQ ID NO: 419, SEQ ID NO: 420, SEQ ID NO: 421, SEQ ID NO: 422, SEQ ID NO: 423, SEQ ID NO: 424, or SEQ ID NO: 425.

[0476] In some examples of any of the ABPCs described herein, the first antigen-binding domain includes a light chain variable domain comprising SEQ ID NO: 367, and a heavy chain variable domain comprising SEQ ID NO: 381, SEQ ID NO: 382, SEQ ID NO: 383, SEQ ID NO: 384, SEQ ID NO: 385, SEQ ID NO: 386, SEQ ID NO: 387, SEQ ID NO: 388, SEQ ID NO: 389, SEQ ID NO: 390, SEQ ID NO: 391, SEQ ID NO: 392, SEQ ID NO: 393, SEQ ID NO: 394, SEQ ID NO: 395, SEQ ID NO: 396, SEQ ID NO: 397, SEQ ID NO: 398, SEQ ID NO: 399, SEQ ID NO: 400, SEQ ID NO: 401, SEQ ID NO: 402, SEQ ID NO: 403, SEQ ID NO: 404, SEQ ID NO: 405, SEQ ID NO: 406, SEQ ID NO: 407, SEQ ID NO: 408, SEQ ID NO: 409, SEQ ID NO: 410, SEQ ID NO: 411, SEQ ID NO: 412, SEQ ID NO: 413, SEQ ID NO: 414, SEQ ID NO: 415, SEQ ID NO: 416, SEQ ID NO: 417, SEQ ID NO: 418, SEQ ID NO: 419, SEQ ID NO: 420, SEQ ID NO: 421, SEQ ID NO: 422, SEQ ID NO: 423, SEQ ID NO: 424, or SEQ ID NO: 425.

[0477] In some examples of any of the ABPCs described herein, the first antigen-binding domain includes a light chain variable domain comprising SEQ ID NO: 368, and a heavy chain variable domain comprising SEQ ID NO: 381, SEQ ID NO: 382, SEQ ID NO: 383, SEQ ID NO: 384, SEQ ID NO: 385, SEQ ID NO: 386, SEQ ID NO: 387, SEQ ID NO: 388, SEQ ID NO: 389, SEQ ID NO: 390, SEQ ID NO: 391, SEQ ID NO: 392, SEQ ID NO: 393, SEQ ID NO: 394, SEQ ID NO: 395, SEQ ID NO: 396, SEQ ID NO: 397, SEQ ID NO: 398, SEQ ID NO: 399, SEQ ID NO: 400, SEQ ID NO: 401, SEQ ID NO: 402, SEQ ID NO: 403, SEQ ID NO: 404, SEQ ID NO: 405, SEQ ID NO: 406, SEQ ID NO: 407, SEQ ID NO: 408, SEQ ID NO: 409, SEQ ID NO: 410, SEQ ID NO: 411, SEQ ID NO: 412, SEQ ID NO: 413, SEQ ID NO: 414, SEQ ID NO: 415, SEQ ID NO: 416, SEQ ID NO: 417, SEQ ID NO: 418, SEQ ID NO: 419, SEQ ID NO: 420, SEQ ID NO: 421, SEQ ID NO: 422, SEQ ID NO: 423, SEQ ID NO: 424, or SEQ ID NO: 425.

[0478] In some examples of any of the ABPCs described herein, the first antigen-binding domain includes a light chain variable domain comprising SEQ ID NO: 369, and a heavy chain variable domain comprising SEQ ID NO: 381, SEQ ID NO: 382, SEQ ID NO: 383, SEQ ID NO: 384, SEQ ID NO: 385, SEQ ID NO: 386, SEQ ID NO: 387, SEQ ID NO: 388, SEQ ID NO: 389, SEQ ID NO: 390, SEQ ID NO: 391, SEQ ID NO: 392, SEQ ID NO: 393, SEQ ID NO: 394, SEQ ID NO: 395, SEQ ID NO: 396, SEQ ID NO: 397, SEQ ID NO: 398, SEQ ID NO: 399, SEQ ID NO: 400, SEQ ID NO: 401, SEQ ID NO: 402, SEQ ID NO: 403, SEQ ID NO: 404, SEQ ID NO: 405, SEQ ID NO: 406, SEQ ID NO: 407, SEQ ID NO: 408, SEQ ID NO: 409, SEQ ID NO: 410, SEQ ID NO: 411, SEQ ID NO: 412, SEQ ID NO: 413, SEQ ID NO: 414, SEQ ID NO: 415, SEQ ID NO: 416, SEQ ID NO: 417, SEQ ID NO: 418, SEQ ID NO: 419, SEQ ID NO: 420, SEQ ID NO: 421, SEQ ID NO: 422, SEQ ID NO: 423, SEQ ID NO: 424, or SEQ ID NO: 425.

[0479] In some examples of any of the ABPCs described herein, the first antigen-binding domain includes a light chain variable domain comprising SEQ ID NO: 370, and a heavy chain variable domain comprising SEQ ID NO: 381, SEQ ID NO: 382, SEQ ID NO: 383, SEQ ID NO: 384, SEQ ID NO: 385, SEQ ID NO: 386, SEQ ID NO: 387, SEQ ID NO: 388, SEQ ID NO: 389, SEQ ID NO: 390, SEQ ID NO: 391, SEQ ID NO: 392, SEQ ID NO: 393, SEQ ID NO: 394, SEQ ID NO: 395, SEQ ID NO: 396, SEQ ID NO: 397, SEQ ID NO: 398, SEQ ID NO: 399, SEQ ID NO: 400, SEQ ID NO: 401, SEQ ID NO: 402, SEQ ID NO: 403, SEQ ID NO: 404, SEQ ID NO: 405, SEQ ID NO: 406, SEQ ID NO: 407, SEQ ID NO: 408, SEQ ID NO: 409, SEQ ID NO: 410, SEQ ID NO: 411, SEQ ID NO: 412, SEQ ID NO: 413, SEQ ID NO: 414, SEQ ID NO: 415, SEQ ID NO: 416, SEQ ID NO: 417, SEQ ID NO: 418, SEQ ID NO: 419, SEQ ID NO: 420, SEQ ID NO: 421, SEQ ID NO: 422, SEQ ID NO: 423, SEQ ID NO: 424, or SEQ ID NO: 425.

[0480] In some examples of any of the ABPCs described herein, the first antigen-binding domain includes a light chain variable domain comprising SEQ ID NO: 371, and a heavy chain variable domain comprising SEQ ID NO: 381, SEQ ID NO: 382, SEQ ID NO: 383, SEQ ID NO: 384, SEQ ID NO: 385, SEQ ID NO: 386, SEQ ID NO: 387, SEQ ID NO: 388, SEQ ID NO: 389, SEQ ID NO: 390, SEQ ID NO: 391, SEQ ID NO: 392, SEQ ID NO: 393, SEQ ID NO: 394, SEQ ID NO: 395, SEQ ID NO: 396, SEQ ID NO: 397, SEQ ID NO: 398, SEQ ID NO: 399, SEQ ID NO: 400, SEQ ID NO: 401, SEQ ID NO: 402, SEQ ID NO: 403, SEQ ID NO: 404, SEQ ID NO: 405, SEQ ID NO: 406, SEQ ID NO: 407, SEQ ID NO: 408, SEQ ID NO: 409, SEQ ID NO: 410, SEQ ID NO: 411, SEQ ID NO: 412, SEQ ID NO: 413, SEQ ID NO: 414, SEQ ID NO: 415, SEQ ID NO: 416, SEQ ID NO: 417, SEQ ID NO: 418, SEQ ID NO: 419, SEQ ID NO: 420, SEQ ID NO: 421, SEQ ID NO: 422, SEQ ID NO: 423, SEQ ID NO: 424, or SEQ ID NO: 425.

[0481] In some examples of any of the ABPCs described herein, the first antigen-binding domain includes a light chain variable domain comprising SEQ ID NO: 372, and a heavy chain variable domain comprising SEQ ID NO: 381, SEQ ID NO: 382, SEQ ID NO: 383, SEQ ID NO: 384, SEQ ID NO: 385, SEQ ID NO: 386, SEQ ID NO: 387, SEQ ID NO: 388, SEQ ID NO: 389, SEQ ID NO: 390, SEQ ID NO: 391, SEQ ID NO: 392, SEQ ID NO: 393, SEQ ID NO: 394, SEQ ID NO: 395, SEQ ID NO: 396, SEQ ID NO: 397, SEQ ID NO: 398, SEQ ID NO: 399, SEQ ID NO: 400, SEQ ID NO: 401, SEQ ID NO: 402, SEQ ID NO: 403, SEQ ID NO: 404, SEQ ID NO: 405, SEQ ID NO: 406, SEQ ID NO: 407, SEQ ID NO: 408, SEQ ID NO: 409, SEQ ID NO: 410, SEQ ID NO: 411, SEQ ID NO: 412, SEQ ID NO: 413, SEQ ID NO: 414, SEQ ID NO: 415, SEQ ID NO: 416, SEQ ID NO: 417, SEQ ID NO: 418, SEQ ID NO: 419, SEQ ID NO: 420, SEQ ID NO: 421, SEQ ID NO: 422, SEQ ID NO: 423, SEQ ID NO: 424, or SEQ ID NO: 425.

[0482] In some examples of any of the ABPCs described herein, the first antigen-binding domain includes a light chain variable domain comprising SEQ ID NO: 373, and a heavy chain variable domain comprising SEQ ID NO: 381, SEQ ID NO: 382, SEQ ID NO: 383, SEQ ID NO: 384, SEQ ID NO: 385, SEQ ID NO: 386, SEQ ID NO: 387, SEQ ID NO: 388, SEQ ID NO: 389, SEQ ID NO: 390, SEQ ID NO: 391, SEQ ID NO: 392, SEQ ID NO: 393, SEQ ID NO: 394, SEQ ID NO: 395, SEQ ID NO: 396, SEQ ID NO: 397, SEQ ID NO: 398, SEQ ID NO: 399, SEQ ID NO: 400, SEQ ID NO: 401, SEQ ID NO: 402, SEQ ID NO: 403, SEQ ID NO: 404, SEQ ID NO: 405, SEQ ID NO: 406, SEQ ID NO: 407, SEQ ID NO: 408, SEQ ID NO: 409, SEQ ID NO: 410, SEQ ID NO: 411, SEQ ID NO: 412, SEQ ID NO: 413, SEQ ID NO: 414, SEQ ID NO: 415, SEQ ID NO: 416, SEQ ID NO: 417, SEQ ID NO: 418, SEQ ID NO: 419, SEQ ID NO: 420, SEQ ID NO: 421, SEQ ID NO: 422, SEQ ID NO: 423, SEQ ID NO: 424, or SEQ ID NO: 425.

[0483] In some examples of any of the ABPCs described herein, the first antigen-binding domain includes a light chain variable domain comprising SEQ ID NO: 374, and a heavy chain variable domain comprising SEQ ID NO: 381, SEQ ID NO: 382, SEQ ID NO: 383, SEQ ID NO: 384, SEQ ID NO: 385, SEQ ID NO: 386, SEQ ID NO: 387, SEQ ID NO: 388, SEQ ID NO: 389, SEQ ID NO: 390, SEQ ID NO: 391, SEQ ID NO: 392, SEQ ID NO: 393, SEQ ID NO: 394, SEQ ID NO: 395, SEQ ID NO: 396, SEQ ID NO: 397, SEQ ID NO: 398, SEQ ID NO: 399, SEQ ID NO: 400, SEQ ID NO: 401, SEQ ID NO: 402, SEQ ID NO: 403, SEQ ID NO: 404, SEQ ID NO: 405, SEQ ID NO: 406, SEQ ID NO: 407, SEQ ID NO: 408, SEQ ID NO: 409, SEQ ID NO: 410, SEQ ID NO: 411, SEQ ID NO: 412, SEQ ID NO: 413, SEQ ID NO: 414, SEQ ID NO: 415, SEQ ID NO: 416, SEQ ID NO: 417, SEQ ID NO: 418, SEQ ID NO: 419, SEQ ID NO: 420, SEQ ID NO: 421, SEQ ID NO: 422, SEQ ID NO: 423, SEQ ID NO: 424, or SEQ ID NO: 425.

[0484] In some examples of any of the ABPCs described herein, the first antigen-binding domain includes a light chain variable domain comprising SEQ ID NO: 375, and a heavy chain variable domain comprising SEQ ID NO: 381, SEQ ID NO: 382, SEQ ID NO: 383, SEQ ID NO: 384, SEQ ID NO: 385, SEQ ID NO: 386, SEQ ID NO: 387, SEQ ID NO: 388, SEQ ID NO: 389, SEQ ID NO: 390, SEQ ID NO: 391, SEQ ID NO: 392, SEQ ID NO: 393, SEQ ID NO: 394, SEQ ID NO: 395, SEQ ID NO: 396, SEQ ID NO: 397, SEQ ID NO: 398, SEQ ID NO: 399, SEQ ID NO: 400, SEQ ID NO: 401, SEQ ID NO: 402, SEQ ID NO: 403, SEQ ID NO: 404, SEQ ID NO: 405, SEQ ID NO: 406, SEQ ID NO: 407, SEQ ID NO: 408, SEQ ID NO: 409, SEQ ID NO: 410, SEQ ID NO: 411, SEQ ID NO: 412, SEQ ID NO: 413, SEQ ID NO: 414, SEQ ID NO: 415, SEQ ID NO: 416, SEQ ID NO: 417, SEQ ID NO: 418, SEQ ID NO: 419, SEQ ID NO: 420, SEQ ID NO: 421, SEQ ID NO: 422, SEQ ID NO: 423, SEQ ID NO: 424, or SEQ ID NO: 425.

[0485] In some examples of any of the ABPCs described herein, the first antigen-binding domain includes a light chain variable domain comprising SEQ ID NO: 376, and a heavy chain variable domain comprising SEQ ID NO: 381, SEQ ID NO: 382, SEQ ID NO: 383, SEQ ID NO: 384, SEQ ID NO: 385, SEQ ID NO: 386, SEQ ID NO: 387, SEQ ID NO: 388, SEQ ID NO: 389, SEQ ID NO: 390, SEQ ID NO: 391, SEQ ID NO: 392, SEQ ID NO: 393, SEQ ID NO: 394, SEQ ID NO: 395, SEQ ID NO: 396, SEQ ID NO: 397, SEQ ID NO: 398, SEQ ID NO: 399, SEQ ID NO: 400, SEQ ID NO: 401, SEQ ID NO: 402, SEQ ID NO: 403, SEQ ID NO: 404, SEQ ID NO: 405, SEQ ID NO: 406, SEQ ID NO: 407, SEQ ID NO: 408, SEQ ID NO: 409, SEQ ID NO: 410, SEQ ID NO: 411, SEQ ID NO: 412, SEQ ID NO: 413, SEQ ID NO: 414, SEQ ID NO: 415, SEQ ID NO: 416, SEQ ID NO: 417, SEQ ID NO: 418, SEQ ID NO: 419, SEQ ID NO: 420, SEQ ID NO: 421, SEQ ID NO: 422, SEQ ID NO: 423, SEQ ID NO: 424, or SEQ ID NO: 425.

[0486] In some examples of any of the ABPCs described herein, the first antigen-binding domain includes a light chain variable domain comprising SEQ ID NO: 377, and a heavy chain variable domain comprising SEQ ID NO: 381, SEQ ID NO: 382, SEQ ID NO: 383, SEQ ID NO: 384, SEQ ID NO: 385, SEQ ID NO: 386, SEQ ID NO: 387, SEQ ID NO: 388, SEQ ID NO: 389, SEQ ID NO: 390, SEQ ID NO: 391, SEQ ID NO: 392, SEQ ID NO: 393, SEQ ID NO: 394, SEQ ID NO: 395, SEQ ID NO: 396, SEQ ID NO: 397, SEQ ID NO: 398, SEQ ID NO: 399, SEQ ID NO: 400, SEQ ID NO: 401, SEQ ID NO: 402, SEQ ID NO: 403, SEQ ID NO: 404, SEQ ID NO: 405, SEQ ID NO: 406, SEQ ID NO: 407, SEQ ID NO: 408, SEQ ID NO: 409, SEQ ID NO: 410, SEQ ID NO: 411, SEQ ID NO: 412, SEQ ID NO: 413, SEQ ID NO: 414, SEQ ID NO: 415, SEQ ID NO: 416, SEQ ID NO: 417, SEQ ID NO: 418, SEQ ID NO: 419, SEQ ID NO: 420, SEQ ID NO: 421, SEQ ID NO: 422, SEQ ID NO: 423, SEQ ID NO: 424, or SEQ ID NO: 425.

[0487] In some examples of any of the ABPCs described herein, the first antigen-binding domain includes a light chain variable domain comprising SEQ ID NO: 378, and a heavy chain variable domain comprising SEQ ID NO: 381, SEQ ID NO: 382, SEQ ID NO: 383, SEQ ID NO: 384, SEQ ID NO: 385, SEQ ID NO: 386, SEQ ID NO: 387, SEQ ID NO: 388, SEQ ID NO: 389, SEQ ID NO: 390, SEQ ID NO: 391, SEQ ID NO: 392, SEQ ID NO: 393, SEQ ID NO: 394, SEQ ID NO: 395, SEQ ID NO: 396, SEQ ID NO: 397, SEQ ID NO: 398, SEQ ID NO: 399, SEQ ID NO: 400, SEQ ID NO: 401, SEQ ID NO: 402, SEQ ID NO: 403, SEQ ID NO: 404, SEQ ID NO: 405, SEQ ID NO: 406, SEQ ID NO: 407, SEQ ID NO: 408, SEQ ID NO: 409, SEQ ID NO: 410, SEQ ID NO: 411, SEQ ID NO: 412, SEQ ID NO: 413, SEQ ID NO: 414, SEQ ID NO: 415, SEQ ID NO: 416, SEQ ID NO: 417, SEQ ID NO: 418, SEQ ID NO: 419, SEQ ID NO: 420, SEQ ID NO: 421, SEQ ID NO: 422, SEQ ID NO: 423, SEQ ID NO: 424, or SEQ ID NO: 425.

[0488] In some examples of any of the ABPCs described herein, the first antigen-binding domain includes a light chain variable domain comprising SEQ ID NO: 379, and a heavy chain variable domain comprising SEQ ID NO: 381, SEQ ID NO: 382, SEQ ID NO: 383, SEQ ID NO: 384, SEQ ID NO: 385, SEQ ID NO: 386, SEQ ID NO: 387, SEQ ID NO: 388, SEQ ID NO: 389, SEQ ID NO: 390, SEQ ID NO: 391, SEQ ID NO: 392, SEQ ID NO: 393, SEQ ID NO: 394, SEQ ID NO: 395, SEQ ID NO: 396, SEQ ID NO: 397, SEQ ID NO: 398, SEQ ID NO: 399, SEQ ID NO: 400, SEQ ID NO: 401, SEQ ID NO: 402, SEQ ID NO: 403, SEQ ID NO: 404, SEQ ID NO: 405, SEQ ID NO: 406, SEQ ID NO: 407, SEQ ID NO: 408, SEQ ID NO: 409, SEQ ID NO: 410, SEQ ID NO: 411, SEQ ID NO: 412, SEQ ID NO: 413, SEQ ID NO: 414, SEQ ID NO: 415, SEQ ID NO: 416, SEQ ID NO: 417, SEQ ID NO: 418, SEQ ID NO: 419, SEQ ID NO: 420, SEQ ID NO: 421, SEQ ID NO: 422, SEQ ID NO: 423, SEQ ID NO: 424, or SEQ ID NO: 425.

[0489] In some examples of any of the ABPCs described herein, the first antigen-binding domain includes a light chain variable domain comprising SEQ ID NO: 380, and a heavy chain variable domain comprising SEQ ID NO: 381, SEQ ID NO: 382, SEQ ID NO: 383, SEQ ID NO: 384, SEQ ID NO: 385, SEQ ID NO: 386, SEQ ID NO: 387, SEQ ID NO: 388, SEQ ID NO: 389, SEQ ID NO: 390, SEQ ID NO: 391, SEQ ID NO: 392, SEQ ID NO: 393, SEQ ID NO: 394, SEQ ID NO: 395, SEQ ID NO: 396, SEQ ID NO: 397, SEQ ID NO: 398, SEQ ID NO: 399, SEQ ID NO: 400, SEQ ID NO: 401, SEQ ID NO: 402, SEQ ID NO: 403, SEQ ID NO: 404, SEQ ID NO: 405, SEQ ID NO: 406, SEQ ID NO: 407, SEQ ID NO: 408, SEQ ID NO: 409, SEQ ID NO: 410, SEQ ID NO: 411, SEQ ID NO: 412, SEQ ID NO: 413, SEQ ID NO: 414, SEQ ID NO: 415, SEQ ID NO: 416, SEQ ID NO: 417, SEQ ID NO: 418, SEQ ID NO: 419, SEQ ID NO: 420, SEQ ID NO: 421, SEQ ID NO: 422, SEQ ID NO: 423, SEQ ID NO: 424, or SEQ ID NO: 425.

[0490] In some examples of any of the ABPCs described herein, the first-antigen binding domain includes a light chain variable domain comprising: SEQ ID NO: 426, SEQ ID NO: 427, SEQ ID NO: 428, SEQ ID NO: 429, SEQ ID NO: 430, SEQ ID NO: 431, SEQ ID NO: 432, SEQ ID NO: 433, SEQ ID NO: 434, SEQ ID NO: 435, SEQ ID NO: 436, SEQ ID NO: 437, SEQ ID NO: 438, SEQ ID NO: 439, SEQ ID NO: 440, SEQ ID NO: 441, SEQ ID NO: 442, SEQ ID NO: 443, SEQ ID NO: 444, SEQ ID NO: 445, SEQ ID NO: 446, SEQ ID NO: 447, SEQ ID NO: 448, SEQ ID NO: 449, SEQ ID NO: 450, SEQ ID NO: 451, SEQ ID NO: 452, SEQ ID NO: 453, SEQ ID NO: 454, SEQ ID NO: 455, SEQ ID NO: 456, SEQ ID NO: 457, SEQ ID NO: 458, SEQ ID NO: 459, SEQ ID NO: 460, SEQ ID NO: 461, SEQ ID NO: 462, SEQ ID NO: 463, SEQ ID NO: 464, SEQ ID NO: 465, SEQ ID NO: 466, SEQ ID NO: 467, SEQ ID NO: 468, SEQ ID NO: 469, SEQ ID NO: 470, SEQ ID NO: 471, SEQ ID NO: 472, SEQ ID NO: 473, SEQ ID NO: 474, SEQ ID NO: 475, SEQ ID NO: 476, SEQ ID NO: 477, SEQ ID NO: 478, SEQ ID NO: 479, SEQ ID NO: 480, SEQ ID NO: 481, SEQ ID NO: 482, SEQ ID NO: 483, SEQ ID NO: 484, SEQ ID NO: 485, SEQ ID NO: 486, SEQ ID NO: 487, SEQ ID NO: 488, SEQ ID NO: 489, SEQ ID NO: 490, SEQ ID NO: 491, SEQ ID NO: 492, SEQ ID NO: 493, SEQ ID NO: 494, SEQ ID NO: 495, SEQ ID NO: 496, SEQ ID NO: 497, SEQ ID NO: 498, SEQ ID NO: 499, SEQ ID NO: 500, or SEQ ID NO: 501.

[0491] In some examples of any of the ABPCs described herein, the first antigen-binding domain includes a light chain variable domain comprising SEQ ID NO: 426, and a heavy chain variable domain comprising: SEQ ID NO: 304, SEQ ID NO: 312, SEQ ID NO: 313, SEQ ID NO: 314, SEQ ID NO: 315, SEQ ID NO: 316, SEQ ID NO: 317, SEQ ID NO: 318, SEQ ID NO: 319, SEQ ID NO: 320, SEQ ID NO: 321, SEQ ID NO: 322, SEQ ID NO: 323, SEQ ID NO: 324, SEQ ID NO: 325, SEQ ID NO: 326, SEQ ID NO: 327, SEQ ID NO: 328, SEQ ID NO: 329, SEQ ID NO: 330, SEQ ID NO: 331, SEQ ID NO: 332, SEQ ID NO: 333, SEQ ID NO: 334, SEQ ID NO: 335, SEQ ID NO: 336, SEQ ID NO: 337, SEQ ID NO: 338, SEQ ID NO: 339, SEQ ID NO: 340, SEQ ID NO: 341, SEQ ID NO: 342, SEQ ID NO: 343, SEQ ID NO: 344, SEQ ID NO: 345, SEQ ID NO: 346, SEQ ID NO: 347, SEQ ID NO: 348, SEQ ID NO: 349, SEQ ID NO: 381, SEQ ID NO: 382, SEQ ID NO: 383, SEQ ID NO: 384, SEQ ID NO: 385, SEQ ID NO: 386, SEQ ID NO: 387, SEQ ID NO: 388, SEQ ID NO: 389, SEQ ID NO: 390, SEQ ID NO: 391, SEQ ID NO: 392, SEQ ID NO: 393, SEQ ID NO: 394, SEQ ID NO: 395, SEQ ID NO: 396, SEQ ID NO: 397, SEQ ID NO: 398, SEQ ID NO: 399, SEQ ID NO: 400, SEQ ID NO: 401, SEQ ID NO: 402, SEQ ID NO: 403, SEQ ID NO: 404, SEQ ID NO: 405, SEQ ID NO: 406, SEQ ID NO: 407, SEQ ID NO: 408, SEQ ID NO: 409, SEQ ID NO: 410, SEQ ID NO: 411, SEQ ID NO: 412, SEQ ID NO: 413, SEQ ID NO: 414, SEQ ID NO: 415, SEQ ID NO: 416, SEQ ID NO: 417, SEQ ID NO: 418, SEQ ID NO: 419, SEQ ID NO: 420, SEQ ID NO: 421, SEQ ID NO: 422, SEQ ID NO: 423, SEQ ID NO: 424, or SEQ ID NO: 425.

[0492] In some examples of any of the ABPCs described herein, the first antigen-binding domain includes a light chain variable domain comprising SEQ ID NO: 427, and a heavy chain variable domain comprising: SEQ ID NO: 304, SEQ ID NO: 312, SEQ ID NO: 313, SEQ ID NO: 314, SEQ ID NO: 315, SEQ ID NO: 316, SEQ ID NO: 317, SEQ ID NO: 318, SEQ ID NO: 319, SEQ ID NO: 320, SEQ ID NO: 321, SEQ ID NO: 322, SEQ ID NO: 323, SEQ ID NO: 324, SEQ ID NO: 325, SEQ ID NO: 326, SEQ ID NO: 327, SEQ ID NO: 328, SEQ ID NO: 329, SEQ ID NO: 330, SEQ ID NO: 331, SEQ ID NO: 332, SEQ ID NO: 333, SEQ ID NO: 334, SEQ ID NO: 335, SEQ ID NO: 336, SEQ ID NO: 337, SEQ ID NO: 338, SEQ ID NO: 339, SEQ ID NO: 340, SEQ ID NO: 341, SEQ ID NO: 342, SEQ ID NO: 343, SEQ ID NO: 344, SEQ ID NO: 345, SEQ ID NO: 346, SEQ ID NO: 347, SEQ ID NO: 348, SEQ ID NO: 349, SEQ ID NO: 381, SEQ ID NO: 382, SEQ ID NO: 383, SEQ ID NO: 384, SEQ ID NO: 385, SEQ ID NO: 386, SEQ ID NO: 387, SEQ ID NO: 388, SEQ ID NO: 389, SEQ ID NO: 390, SEQ ID NO: 391, SEQ ID NO: 392, SEQ ID NO: 393, SEQ ID NO: 394, SEQ ID NO: 395, SEQ ID NO: 396, SEQ ID NO: 397, SEQ ID NO: 398, SEQ ID NO: 399, SEQ ID NO: 400, SEQ ID NO: 401, SEQ ID NO: 402, SEQ ID NO: 403, SEQ ID NO: 404, SEQ ID NO: 405, SEQ ID NO: 406, SEQ ID NO: 407, SEQ ID NO: 408, SEQ ID NO: 409, SEQ ID NO: 410, SEQ ID NO: 411, SEQ ID NO: 412, SEQ ID NO: 413, SEQ ID NO: 414, SEQ ID NO: 415, SEQ ID NO: 416, SEQ ID NO: 417, SEQ ID NO: 418, SEQ ID NO: 419, SEQ ID NO: 420, SEQ ID NO: 421, SEQ ID NO: 422, SEQ ID NO: 423, SEQ ID NO: 424, or SEQ ID NO: 425.

[0493] In some examples of any of the ABPCs described herein, the first antigen-binding domain includes a light chain variable domain comprising SEQ ID NO: 428, and a heavy chain variable domain comprising: SEQ ID NO: 304, SEQ ID NO: 312, SEQ ID NO: 313, SEQ ID NO: 314, SEQ ID NO: 315, SEQ ID NO: 316, SEQ ID NO: 317, SEQ ID NO: 318, SEQ ID NO: 319, SEQ ID NO: 320, SEQ ID NO: 321, SEQ ID NO: 322, SEQ ID NO: 323, SEQ ID NO: 324, SEQ ID NO: 325, SEQ ID NO: 326, SEQ ID NO: 327, SEQ ID NO: 328, SEQ ID NO: 329, SEQ ID NO: 330, SEQ ID NO: 331, SEQ ID NO: 332, SEQ ID NO: 333, SEQ ID NO: 334, SEQ ID NO: 335, SEQ ID NO: 336, SEQ ID NO: 337, SEQ ID NO: 338, SEQ ID NO: 339, SEQ ID NO: 340, SEQ ID NO: 341, SEQ ID NO: 342, SEQ ID NO: 343, SEQ ID NO: 344, SEQ ID NO: 345, SEQ ID NO: 346, SEQ ID NO: 347, SEQ ID NO: 348, SEQ ID NO: 349, SEQ ID NO: 381, SEQ ID NO: 382, SEQ ID NO: 383, SEQ ID NO: 384, SEQ ID NO: 385, SEQ ID NO: 386, SEQ ID NO: 387, SEQ ID NO: 388, SEQ ID NO: 389, SEQ ID NO: 390, SEQ ID NO: 391, SEQ ID NO: 392, SEQ ID NO: 393, SEQ ID NO: 394, SEQ ID NO: 395, SEQ ID NO: 396, SEQ ID NO: 397, SEQ ID NO: 398, SEQ ID NO: 399, SEQ ID NO: 400, SEQ ID NO: 401, SEQ ID NO: 402, SEQ ID NO: 403, SEQ ID NO: 404, SEQ ID NO: 405, SEQ ID NO: 406, SEQ ID NO: 407, SEQ ID NO: 408, SEQ ID NO: 409, SEQ ID NO: 410, SEQ ID NO: 411, SEQ ID NO: 412, SEQ ID NO: 413, SEQ ID NO: 414, SEQ ID NO: 415, SEQ ID NO: 416, SEQ ID NO: 417, SEQ ID NO: 418, SEQ ID NO: 419, SEQ ID NO: 420, SEQ ID NO: 421, SEQ ID NO: 422, SEQ ID NO: 423, SEQ ID NO: 424, or SEQ ID NO: 425.

[0494] In some examples of any of the ABPCs described herein, the first antigen-binding domain includes a light chain variable domain comprising SEQ ID NO: 429, and a heavy chain variable domain comprising: SEQ ID NO: 304, SEQ ID NO: 312, SEQ ID NO: 313, SEQ ID NO: 314, SEQ ID NO: 315, SEQ ID NO: 316, SEQ ID NO: 317, SEQ ID NO: 318, SEQ ID NO: 319, SEQ ID NO: 320, SEQ ID NO: 321, SEQ ID NO: 322, SEQ ID NO: 323, SEQ ID NO: 324, SEQ ID NO: 325, SEQ ID NO: 326, SEQ ID NO: 327, SEQ ID NO: 328, SEQ ID NO: 329, SEQ ID NO: 330, SEQ ID NO: 331, SEQ ID NO: 332, SEQ ID NO: 333, SEQ ID NO: 334, SEQ ID NO: 335, SEQ ID NO: 336, SEQ ID NO: 337, SEQ ID NO: 338, SEQ ID NO: 339, SEQ ID NO: 340, SEQ ID NO: 341, SEQ ID NO: 342, SEQ ID NO: 343, SEQ ID NO: 344, SEQ ID NO: 345, SEQ ID NO: 346, SEQ ID NO: 347, SEQ ID NO: 348, SEQ ID NO: 349, SEQ ID NO: 381, SEQ ID NO: 382, SEQ ID NO: 383, SEQ ID NO: 384, SEQ ID NO: 385, SEQ ID NO: 386, SEQ ID NO: 387, SEQ ID NO: 388, SEQ ID NO: 389, SEQ ID NO: 390, SEQ ID NO: 391, SEQ ID NO: 392, SEQ ID NO: 393, SEQ ID NO: 394, SEQ ID NO: 395, SEQ ID NO: 396, SEQ ID NO: 397, SEQ ID NO: 398, SEQ ID NO: 399, SEQ ID NO: 400, SEQ ID NO: 401, SEQ ID NO: 402, SEQ ID NO: 403, SEQ ID NO: 404, SEQ ID NO: 405, SEQ ID NO: 406, SEQ ID NO: 407, SEQ ID NO: 408, SEQ ID NO: 409, SEQ ID NO: 410, SEQ ID NO: 411, SEQ ID NO: 412, SEQ ID NO: 413, SEQ ID NO: 414, SEQ ID NO: 415, SEQ ID NO: 416, SEQ ID NO: 417, SEQ ID NO: 418, SEQ ID NO: 419, SEQ ID NO: 420, SEQ ID NO: 421, SEQ ID NO: 422, SEQ ID NO: 423, SEQ ID NO: 424, or SEQ ID NO: 425.

[0495] In some examples of any of the ABPCs described herein, the first antigen-binding domain includes a light chain variable domain comprising SEQ ID NO: 430, and a heavy chain variable domain comprising: SEQ ID NO: 304, SEQ ID NO: 312, SEQ ID NO: 313, SEQ ID NO: 314, SEQ ID NO: 315, SEQ ID NO: 316, SEQ ID NO: 317, SEQ ID NO: 318, SEQ ID NO: 319, SEQ ID NO: 320, SEQ ID NO: 321, SEQ ID NO: 322, SEQ ID NO: 323, SEQ ID NO: 324, SEQ ID NO: 325, SEQ ID NO: 326, SEQ ID NO: 327, SEQ ID NO: 328, SEQ ID NO: 329, SEQ ID NO: 330, SEQ ID NO: 331, SEQ ID NO: 332, SEQ ID NO: 333, SEQ ID NO: 334, SEQ ID NO: 335, SEQ ID NO: 336, SEQ ID NO: 337, SEQ ID NO: 338, SEQ ID NO: 339, SEQ ID NO: 340, SEQ ID NO: 341, SEQ ID NO: 342, SEQ ID NO: 343, SEQ ID NO: 344, SEQ ID NO: 345, SEQ ID NO: 346, SEQ ID NO: 347, SEQ ID NO: 348, SEQ ID NO: 349, SEQ ID NO: 381, SEQ ID NO: 382, SEQ ID NO: 383, SEQ ID NO: 384, SEQ ID NO: 385, SEQ ID NO: 386, SEQ ID NO: 387, SEQ ID NO: 388, SEQ ID NO: 389, SEQ ID NO: 390, SEQ ID NO: 391, SEQ ID NO: 392, SEQ ID NO: 393, SEQ ID NO: 394, SEQ ID NO: 395, SEQ ID NO: 396, SEQ ID NO: 397, SEQ ID NO: 398, SEQ ID NO: 399, SEQ ID NO: 400, SEQ ID NO: 401, SEQ ID NO: 402, SEQ ID NO: 403, SEQ ID NO: 404, SEQ ID NO: 405, SEQ ID NO: 406, SEQ ID NO: 407, SEQ ID NO: 408, SEQ ID NO: 409, SEQ ID NO: 410, SEQ ID NO: 411, SEQ ID NO: 412, SEQ ID NO: 413, SEQ ID NO: 414, SEQ ID NO: 415, SEQ ID NO: 416, SEQ ID NO: 417, SEQ ID NO: 418, SEQ ID NO: 419, SEQ ID NO: 420, SEQ ID NO: 421, SEQ ID NO: 422, SEQ ID NO: 423, SEQ ID NO: 424, or SEQ ID NO: 425.

[0496] In some examples of any of the ABPCs described herein, the first antigen-binding domain includes a light chain variable domain comprising SEQ ID NO: 431, and a heavy chain variable domain comprising: SEQ ID NO: 304, SEQ ID NO: 312, SEQ ID NO: 313, SEQ ID NO: 314, SEQ ID NO: 315, SEQ ID NO: 316, SEQ ID NO: 317, SEQ ID NO: 318, SEQ ID NO: 319, SEQ ID NO: 320, SEQ ID NO: 321, SEQ ID NO: 322, SEQ ID NO: 323, SEQ ID NO: 324, SEQ ID NO: 325, SEQ ID NO: 326, SEQ ID NO: 327, SEQ ID NO: 328, SEQ ID NO: 329, SEQ ID NO: 330, SEQ ID NO: 331, SEQ ID NO: 332, SEQ ID NO: 333, SEQ ID NO: 334, SEQ ID NO: 335, SEQ ID NO: 336, SEQ ID NO: 337, SEQ ID NO: 338, SEQ ID NO: 339, SEQ ID NO: 340, SEQ ID NO: 341, SEQ ID NO: 342, SEQ ID NO: 343, SEQ ID NO: 344, SEQ ID NO: 345, SEQ ID NO: 346, SEQ ID NO: 347, SEQ ID NO: 348, SEQ ID NO: 349, SEQ ID NO: 381, SEQ ID NO: 382, SEQ ID NO: 383, SEQ ID NO: 384, SEQ ID NO: 385, SEQ ID NO: 386, SEQ ID NO: 387, SEQ ID NO: 388, SEQ ID NO: 389, SEQ ID NO: 390, SEQ ID NO: 391, SEQ ID NO: 392, SEQ ID NO: 393, SEQ ID NO: 394, SEQ ID NO: 395, SEQ ID NO: 396, SEQ ID NO: 397, SEQ ID NO: 398, SEQ ID NO: 399, SEQ ID NO: 400, SEQ ID NO: 401, SEQ ID NO: 402, SEQ ID NO: 403, SEQ ID NO: 404, SEQ ID NO: 405, SEQ ID NO: 406, SEQ ID NO: 407, SEQ ID NO: 408, SEQ ID NO: 409, SEQ ID NO: 410, SEQ ID NO: 411, SEQ ID NO: 412, SEQ ID NO: 413, SEQ ID NO: 414, SEQ ID NO: 415, SEQ ID NO: 416, SEQ ID NO: 417, SEQ ID NO: 418, SEQ ID NO: 419, SEQ ID NO: 420, SEQ ID NO: 421, SEQ ID NO: 422, SEQ ID NO: 423, SEQ ID NO: 424, or SEQ ID NO: 425.

[0497] In some examples of any of the ABPCs described herein, the first antigen-binding domain includes a light chain variable domain comprising SEQ ID NO: 432, and a heavy chain variable domain comprising: SEQ ID NO: 304, SEQ ID NO: 312, SEQ ID NO: 313, SEQ ID NO: 314, SEQ ID NO: 315, SEQ ID NO: 316, SEQ ID NO: 317, SEQ ID NO: 318, SEQ ID NO: 319, SEQ ID NO: 320, SEQ ID NO: 321, SEQ ID NO: 322, SEQ ID NO: 323, SEQ ID NO: 324, SEQ ID NO: 325, SEQ ID NO: 326, SEQ ID NO: 327, SEQ ID NO: 328, SEQ ID NO: 329, SEQ ID NO: 330, SEQ ID NO: 331, SEQ ID NO: 332, SEQ ID NO: 333, SEQ ID NO: 334, SEQ ID NO: 335, SEQ ID NO: 336, SEQ ID NO: 337, SEQ ID NO: 338, SEQ ID NO: 339, SEQ ID NO: 340, SEQ ID NO: 341, SEQ ID NO: 342, SEQ ID NO: 343, SEQ ID NO: 344, SEQ ID NO: 345, SEQ ID NO: 346, SEQ ID NO: 347, SEQ ID NO: 348, SEQ ID NO: 349, SEQ ID NO: 381, SEQ ID NO: 382, SEQ ID NO: 383, SEQ ID NO: 384, SEQ ID NO: 385, SEQ ID NO: 386, SEQ ID NO: 387, SEQ ID NO: 388, SEQ ID NO: 389, SEQ ID NO: 390, SEQ ID NO: 391, SEQ ID NO: 392, SEQ ID NO: 393, SEQ ID NO: 394, SEQ ID NO: 395, SEQ ID NO: 396, SEQ ID NO: 397, SEQ ID NO: 398, SEQ ID NO: 399, SEQ ID NO: 400, SEQ ID NO: 401, SEQ ID NO: 402, SEQ ID NO: 403, SEQ ID NO: 404, SEQ ID NO: 405, SEQ ID NO: 406, SEQ ID NO: 407, SEQ ID NO: 408, SEQ ID NO: 409, SEQ ID NO: 410, SEQ ID NO: 411, SEQ ID NO: 412, SEQ ID NO: 413, SEQ ID NO: 414, SEQ ID NO: 415, SEQ ID NO: 416, SEQ ID NO: 417, SEQ ID NO: 418, SEQ ID NO: 419, SEQ ID NO: 420, SEQ ID NO: 421, SEQ ID NO: 422, SEQ ID NO: 423, SEQ ID NO: 424, or SEQ ID NO: 425.

[0498] In some examples of any of the ABPCs described herein, the first antigen-binding domain includes a light chain variable domain comprising SEQ ID NO: 433, and a heavy chain variable domain comprising: SEQ ID NO: 304, SEQ ID NO: 312, SEQ ID NO: 313, SEQ ID NO: 314, SEQ ID NO: 315, SEQ ID NO: 316, SEQ ID NO: 317, SEQ ID NO: 318, SEQ ID NO: 319, SEQ ID NO: 320, SEQ ID NO: 321, SEQ ID NO: 322, SEQ ID NO: 323, SEQ ID NO: 324, SEQ ID NO: 325, SEQ ID NO: 326, SEQ ID NO: 327, SEQ ID NO: 328, SEQ ID NO: 329, SEQ ID NO: 330, SEQ ID NO: 331, SEQ ID NO: 332, SEQ ID NO: 333, SEQ ID NO: 334, SEQ ID NO: 335, SEQ ID NO: 336, SEQ ID NO: 337, SEQ ID NO: 338, SEQ ID NO: 339, SEQ ID NO: 340, SEQ ID NO: 341, SEQ ID NO: 342, SEQ ID NO: 343, SEQ ID NO: 344, SEQ ID NO: 345, SEQ ID NO: 346, SEQ ID NO: 347, SEQ ID NO: 348, SEQ ID NO: 349, SEQ ID NO: 381, SEQ ID NO: 382, SEQ ID NO: 383, SEQ ID NO: 384, SEQ ID NO: 385, SEQ ID NO: 386, SEQ ID NO: 387, SEQ ID NO: 388, SEQ ID NO: 389, SEQ ID NO: 390, SEQ ID NO: 391, SEQ ID NO: 392, SEQ ID NO: 393, SEQ ID NO: 394, SEQ ID NO: 395, SEQ ID NO: 396, SEQ ID NO: 397, SEQ ID NO: 398, SEQ ID NO: 399, SEQ ID NO: 400, SEQ ID NO: 401, SEQ ID NO: 402, SEQ ID NO: 403, SEQ ID NO: 404, SEQ ID NO: 405, SEQ ID NO: 406, SEQ ID NO: 407, SEQ ID NO: 408, SEQ ID NO: 409, SEQ ID NO: 410, SEQ ID NO: 411, SEQ ID NO: 412, SEQ ID NO: 413, SEQ ID NO: 414, SEQ ID NO: 415, SEQ ID NO: 416, SEQ ID NO: 417, SEQ ID NO: 418, SEQ ID NO: 419, SEQ ID NO: 420, SEQ ID NO: 421, SEQ ID NO: 422, SEQ ID NO: 423, SEQ ID NO: 424, or SEQ ID NO: 425.

[0499] In some examples of any of the ABPCs described herein, the first antigen-binding domain includes a light chain variable domain comprising SEQ ID NO: 434, and a heavy chain variable domain comprising: SEQ ID NO: 304, SEQ ID NO: 312, SEQ ID NO: 313, SEQ ID NO: 314, SEQ ID NO: 315, SEQ ID NO: 316, SEQ ID NO: 317, SEQ ID NO: 318, SEQ ID NO: 319, SEQ ID NO: 320, SEQ ID NO: 321, SEQ ID NO: 322, SEQ ID NO: 323, SEQ ID NO: 324, SEQ ID NO: 325, SEQ ID NO: 326, SEQ ID NO: 327, SEQ ID NO: 328, SEQ ID NO: 329, SEQ ID NO: 330, SEQ ID NO: 331, SEQ ID NO: 332, SEQ ID NO: 333, SEQ ID NO: 334, SEQ ID NO: 335, SEQ ID NO: 336, SEQ ID NO: 337, SEQ ID NO: 338, SEQ ID NO: 339, SEQ ID NO: 340, SEQ ID NO: 341, SEQ ID NO: 342, SEQ ID NO: 343, SEQ ID NO: 344, SEQ ID NO: 345, SEQ ID NO: 346, SEQ ID NO: 347, SEQ ID NO: 348, SEQ ID NO: 349, SEQ ID NO: 381, SEQ ID NO: 382, SEQ ID NO: 383, SEQ ID NO: 384, SEQ ID NO: 385, SEQ ID NO: 386, SEQ ID NO: 387, SEQ ID NO: 388, SEQ ID NO: 389, SEQ ID NO: 390, SEQ ID NO: 391, SEQ ID NO: 392, SEQ ID NO: 393, SEQ ID NO: 394, SEQ ID NO: 395, SEQ ID NO: 396, SEQ ID NO: 397, SEQ ID NO: 398, SEQ ID NO: 399, SEQ ID NO: 400, SEQ ID NO: 401, SEQ ID NO: 402, SEQ ID NO: 403, SEQ ID NO: 404, SEQ ID NO: 405, SEQ ID NO: 406, SEQ ID NO: 407, SEQ ID NO: 408, SEQ ID NO: 409, SEQ ID NO: 410, SEQ ID NO: 411, SEQ ID NO: 412, SEQ ID NO: 413, SEQ ID NO: 414, SEQ ID NO: 415, SEQ ID NO: 416, SEQ ID NO: 417, SEQ ID NO: 418, SEQ ID NO: 419, SEQ ID NO: 420, SEQ ID NO: 421, SEQ ID NO: 422, SEQ ID NO: 423, SEQ ID NO: 424, or SEQ ID NO: 425.

[0500] In some examples of any of the ABPCs described herein, the first antigen-binding domain includes a light chain variable domain comprising SEQ ID NO: 435, and a heavy chain variable domain comprising: SEQ ID NO: 304, SEQ ID NO: 312, SEQ ID NO: 313, SEQ ID NO: 314, SEQ ID NO: 315, SEQ ID NO: 316, SEQ ID NO: 317, SEQ ID NO: 318, SEQ ID NO: 319, SEQ ID NO: 320, SEQ ID NO: 321, SEQ ID NO: 322, SEQ ID NO: 323, SEQ ID NO: 324, SEQ ID NO: 325, SEQ ID NO: 326, SEQ ID NO: 327, SEQ ID NO: 328, SEQ ID NO: 329, SEQ ID NO: 330, SEQ ID NO: 331, SEQ ID NO: 332, SEQ ID NO: 333, SEQ ID NO: 334, SEQ ID NO: 335, SEQ ID NO: 336, SEQ ID NO: 337, SEQ ID NO: 338, SEQ ID NO: 339, SEQ ID NO: 340, SEQ ID NO: 341, SEQ ID NO: 342, SEQ ID NO: 343, SEQ ID NO: 344, SEQ ID NO: 345, SEQ ID NO: 346, SEQ ID NO: 347, SEQ ID NO: 348, SEQ ID NO: 349, SEQ ID NO: 381, SEQ ID NO: 382, SEQ ID NO: 383, SEQ ID NO: 384, SEQ ID NO: 385, SEQ ID NO: 386, SEQ ID NO: 387, SEQ ID NO: 388, SEQ ID NO: 389, SEQ ID NO: 390, SEQ ID NO: 391, SEQ ID NO: 392, SEQ ID NO: 393, SEQ ID NO: 394, SEQ ID NO: 395, SEQ ID NO: 396, SEQ ID NO: 397, SEQ ID NO: 398, SEQ ID NO: 399, SEQ ID NO: 400, SEQ ID NO: 401, SEQ ID NO: 402, SEQ ID NO: 403, SEQ ID NO: 404, SEQ ID NO: 405, SEQ ID NO: 406, SEQ ID NO: 407, SEQ ID NO: 408, SEQ ID NO: 409, SEQ ID NO: 410, SEQ ID NO: 411, SEQ ID NO: 412, SEQ ID NO: 413, SEQ ID NO: 414, SEQ ID NO: 415, SEQ ID NO: 416, SEQ ID NO: 417, SEQ ID NO: 418, SEQ ID NO: 419, SEQ ID NO: 420, SEQ ID NO: 421, SEQ ID NO: 422, SEQ ID NO: 423, SEQ ID NO: 424, or SEQ ID NO: 425.

[0501] In some examples of any of the ABPCs described herein, the first antigen-binding domain includes a light chain variable domain comprising SEQ ID NO: 436, and a heavy chain variable domain comprising: SEQ ID NO: 304, SEQ ID NO: 312, SEQ ID NO: 313, SEQ ID NO: 314, SEQ ID NO: 315, SEQ ID NO: 316, SEQ ID NO: 317, SEQ ID NO: 318, SEQ ID NO: 319, SEQ ID NO: 320, SEQ ID NO: 321, SEQ ID NO: 322, SEQ ID NO: 323, SEQ ID NO: 324, SEQ ID NO: 325, SEQ ID NO: 326, SEQ ID NO: 327, SEQ ID NO: 328, SEQ ID NO: 329, SEQ ID NO: 330, SEQ ID NO: 331, SEQ ID NO: 332, SEQ ID NO: 333, SEQ ID NO: 334, SEQ ID NO: 335, SEQ ID NO: 336, SEQ ID NO: 337, SEQ ID NO: 338, SEQ ID NO: 339, SEQ ID NO: 340, SEQ ID NO: 341, SEQ ID NO: 342, SEQ ID NO: 343, SEQ ID NO: 344, SEQ ID NO: 345, SEQ ID NO: 346, SEQ ID NO: 347, SEQ ID NO: 348, SEQ ID NO: 349, SEQ ID NO: 381, SEQ ID NO: 382, SEQ ID NO: 383, SEQ ID NO: 384, SEQ ID NO: 385, SEQ ID NO: 386, SEQ ID NO: 387, SEQ ID NO: 388, SEQ ID NO: 389, SEQ ID NO: 390, SEQ ID NO: 391, SEQ ID NO: 392, SEQ ID NO: 393, SEQ ID NO: 394, SEQ ID NO: 395, SEQ ID NO: 396, SEQ ID NO: 397, SEQ ID NO: 398, SEQ ID NO: 399, SEQ ID NO: 400, SEQ ID NO: 401, SEQ ID NO: 402, SEQ ID NO: 403, SEQ ID NO: 404, SEQ ID NO: 405, SEQ ID NO: 406, SEQ ID NO: 407, SEQ ID NO: 408, SEQ ID NO: 409, SEQ ID NO: 410, SEQ ID NO: 411, SEQ ID NO: 412, SEQ ID NO: 413, SEQ ID NO: 414, SEQ ID NO: 415, SEQ ID NO: 416, SEQ ID NO: 417, SEQ ID NO: 418, SEQ ID NO: 419, SEQ ID NO: 420, SEQ ID NO: 421, SEQ ID NO: 422, SEQ ID NO: 423, SEQ ID NO: 424, or SEQ ID NO: 425.

[0502] In some examples of any of the ABPCs described herein, the first antigen-binding domain includes a light chain variable domain comprising SEQ ID NO: 437, and a heavy chain variable domain comprising: SEQ ID NO: 304, SEQ ID NO: 312, SEQ ID NO: 313, SEQ ID NO: 314, SEQ ID NO: 315, SEQ ID NO: 316, SEQ ID NO: 317, SEQ ID NO: 318, SEQ ID NO: 319, SEQ ID NO: 320, SEQ ID NO: 321, SEQ ID NO: 322, SEQ ID NO: 323, SEQ ID NO: 324, SEQ ID NO: 325, SEQ ID NO: 326, SEQ ID NO: 327, SEQ ID NO: 328, SEQ ID NO: 329, SEQ ID NO: 330, SEQ ID NO: 331, SEQ ID NO: 332, SEQ ID NO: 333, SEQ ID NO: 334, SEQ ID NO: 335, SEQ ID NO: 336, SEQ ID NO: 337, SEQ ID NO: 338, SEQ ID NO: 339, SEQ ID NO: 340, SEQ ID NO: 341, SEQ ID NO: 342, SEQ ID NO: 343, SEQ ID NO: 344, SEQ ID NO: 345, SEQ ID NO: 346, SEQ ID NO: 347, SEQ ID NO: 348, SEQ ID NO: 349, SEQ ID NO: 381, SEQ ID NO: 382, SEQ ID NO: 383, SEQ ID NO: 384, SEQ ID NO: 385, SEQ ID NO: 386, SEQ ID NO: 387, SEQ ID NO: 388, SEQ ID NO: 389, SEQ ID NO: 390, SEQ ID NO: 391, SEQ ID NO: 392, SEQ ID NO: 393, SEQ ID NO: 394, SEQ ID NO: 395, SEQ ID NO: 396, SEQ ID NO: 397, SEQ ID NO: 398, SEQ ID NO: 399, SEQ ID NO: 400, SEQ ID NO: 401, SEQ ID NO: 402, SEQ ID NO: 403, SEQ ID NO: 404, SEQ ID NO: 405, SEQ ID NO: 406, SEQ ID NO: 407, SEQ ID NO: 408, SEQ ID NO: 409, SEQ ID NO: 410, SEQ ID NO: 411, SEQ ID NO: 412, SEQ ID NO: 413, SEQ ID NO: 414, SEQ ID NO: 415, SEQ ID NO: 416, SEQ ID NO: 417, SEQ ID NO: 418, SEQ ID NO: 419, SEQ ID NO: 420, SEQ ID NO: 421, SEQ ID NO: 422, SEQ ID NO: 423, SEQ ID NO: 424, or SEQ ID NO: 425.

[0503] In some examples of any of the ABPCs described herein, the first antigen-binding domain includes a light chain variable domain comprising SEQ ID NO: 438, and a heavy chain variable domain comprising: SEQ ID NO: 304, SEQ ID NO: 312, SEQ ID NO: 313, SEQ ID NO: 314, SEQ ID NO: 315, SEQ ID NO: 316, SEQ ID NO: 317, SEQ ID NO: 318, SEQ ID NO: 319, SEQ ID NO: 320, SEQ ID NO: 321, SEQ ID NO: 322, SEQ ID NO: 323, SEQ ID NO: 324, SEQ ID NO: 325, SEQ ID NO: 326, SEQ ID NO: 327, SEQ ID NO: 328, SEQ ID NO: 329, SEQ ID NO: 330, SEQ ID NO: 331, SEQ ID NO: 332, SEQ ID NO: 333, SEQ ID NO: 334, SEQ ID NO: 335, SEQ ID NO: 336, SEQ ID NO: 337, SEQ ID NO: 338, SEQ ID NO: 339, SEQ ID NO: 340, SEQ ID NO: 341, SEQ ID NO: 342, SEQ ID NO: 343, SEQ ID NO: 344, SEQ ID NO: 345, SEQ ID NO: 346, SEQ ID NO: 347, SEQ ID NO: 348, SEQ ID NO: 349, SEQ ID NO: 381, SEQ ID NO: 382, SEQ ID NO: 383, SEQ ID NO: 384, SEQ ID NO: 385, SEQ ID NO: 386, SEQ ID NO: 387, SEQ ID NO: 388, SEQ ID NO: 389, SEQ ID NO: 390, SEQ ID NO: 391, SEQ ID NO: 392, SEQ ID NO: 393, SEQ ID NO: 394, SEQ ID NO: 395, SEQ ID NO: 396, SEQ ID NO: 397, SEQ ID NO: 398, SEQ ID NO: 399, SEQ ID NO: 400, SEQ ID NO: 401, SEQ ID NO: 402, SEQ ID NO: 403, SEQ ID NO: 404, SEQ ID NO: 405, SEQ ID NO: 406, SEQ ID NO: 407, SEQ ID NO: 408, SEQ ID NO: 409, SEQ ID NO: 410, SEQ ID NO: 411, SEQ ID NO: 412, SEQ ID NO: 413, SEQ ID NO: 414, SEQ ID NO: 415, SEQ ID NO: 416, SEQ ID NO: 417, SEQ ID NO: 418, SEQ ID NO: 419, SEQ ID NO: 420, SEQ ID NO: 421, SEQ ID NO: 422, SEQ ID NO: 423, SEQ ID NO: 424, or SEQ ID NO: 425.

[0504] In some examples of any of the ABPCs described herein, the first antigen-binding domain includes a light chain variable domain comprising SEQ ID NO: 439, and a heavy chain variable domain comprising: SEQ ID NO: 304, SEQ ID NO: 312, SEQ ID NO: 313, SEQ ID NO: 314, SEQ ID NO: 315, SEQ ID NO: 316, SEQ ID NO: 317, SEQ ID NO: 318, SEQ ID NO: 319, SEQ ID NO: 320, SEQ ID NO: 321, SEQ ID NO: 322, SEQ ID NO: 323, SEQ ID NO: 324, SEQ ID NO: 325, SEQ ID NO: 326, SEQ ID NO: 327, SEQ ID NO: 328, SEQ ID NO: 329, SEQ ID NO: 330, SEQ ID NO: 331, SEQ ID NO: 332, SEQ ID NO: 333, SEQ ID NO: 334, SEQ ID NO: 335, SEQ ID NO: 336, SEQ ID NO: 337, SEQ ID NO: 338, SEQ ID NO: 339, SEQ ID NO: 340, SEQ ID NO: 341, SEQ ID NO: 342, SEQ ID NO: 343, SEQ ID NO: 344, SEQ ID NO: 345, SEQ ID NO: 346, SEQ ID NO: 347, SEQ ID NO: 348, SEQ ID NO: 349, SEQ ID NO: 381, SEQ ID NO: 382, SEQ ID NO: 383, SEQ ID NO: 384, SEQ ID NO: 385, SEQ ID NO: 386, SEQ ID NO: 387, SEQ ID NO: 388, SEQ ID NO: 389, SEQ ID NO: 390, SEQ ID NO: 391, SEQ ID NO: 392, SEQ ID NO: 393, SEQ ID NO: 394, SEQ ID NO: 395, SEQ ID NO: 396, SEQ ID NO: 397, SEQ ID NO: 398, SEQ ID NO: 399, SEQ ID NO: 400, SEQ ID NO: 401, SEQ ID NO: 402, SEQ ID NO: 403, SEQ ID NO: 404, SEQ ID NO: 405, SEQ ID NO: 406, SEQ ID NO: 407, SEQ ID NO: 408, SEQ ID NO: 409, SEQ ID NO: 410, SEQ ID NO: 411, SEQ ID NO: 412, SEQ ID NO: 413, SEQ ID NO: 414, SEQ ID NO: 415, SEQ ID NO: 416, SEQ ID NO: 417, SEQ ID NO: 418, SEQ ID NO: 419, SEQ ID NO: 420, SEQ ID NO: 421, SEQ ID NO: 422, SEQ ID NO: 423, SEQ ID NO: 424, or SEQ ID NO: 425.

[0505] In some examples of any of the ABPCs described herein, the first antigen-binding domain includes a light chain variable domain comprising SEQ ID NO: 440, and a heavy chain variable domain comprising: SEQ ID NO: 304, SEQ ID NO: 312, SEQ ID NO: 313, SEQ ID NO: 314, SEQ ID NO: 315, SEQ ID NO: 316, SEQ ID NO: 317, SEQ ID NO: 318, SEQ ID NO: 319, SEQ ID NO: 320, SEQ ID NO: 321, SEQ ID NO: 322, SEQ ID NO: 323, SEQ ID NO: 324, SEQ ID NO: 325, SEQ ID NO: 326, SEQ ID NO: 327, SEQ ID NO: 328, SEQ ID NO: 329, SEQ ID NO: 330, SEQ ID NO: 331, SEQ ID NO: 332, SEQ ID NO: 333, SEQ ID NO: 334, SEQ ID NO: 335, SEQ ID NO: 336, SEQ ID NO: 337, SEQ ID NO: 338, SEQ ID NO: 339, SEQ ID NO: 340, SEQ ID NO: 341, SEQ ID NO: 342, SEQ ID NO: 343, SEQ ID NO: 344, SEQ ID NO: 345, SEQ ID NO: 346, SEQ ID NO: 347, SEQ ID NO: 348, SEQ ID NO: 349, SEQ ID NO: 381, SEQ ID NO: 382, SEQ ID NO: 383, SEQ ID NO: 384, SEQ ID NO: 385, SEQ ID NO: 386, SEQ ID NO: 387, SEQ ID NO: 388, SEQ ID NO: 389, SEQ ID NO: 390, SEQ ID NO: 391, SEQ ID NO: 392, SEQ ID NO: 393, SEQ ID NO: 394, SEQ ID NO: 395, SEQ ID NO: 396, SEQ ID NO: 397, SEQ ID NO: 398, SEQ ID NO: 399, SEQ ID NO: 400, SEQ ID NO: 401, SEQ ID NO: 402, SEQ ID NO: 403, SEQ ID NO: 404, SEQ ID NO: 405, SEQ ID NO: 406, SEQ ID NO: 407, SEQ ID NO: 408, SEQ ID NO: 409, SEQ ID NO: 410, SEQ ID NO: 411, SEQ ID NO: 412, SEQ ID NO: 413, SEQ ID NO: 414, SEQ ID NO: 415, SEQ ID NO: 416, SEQ ID NO: 417, SEQ ID NO: 418, SEQ ID NO: 419, SEQ ID NO: 420, SEQ ID NO: 421, SEQ ID NO: 422, SEQ ID NO: 423, SEQ ID NO: 424, or SEQ ID NO: 425.

[0506] In some examples of any of the ABPCs described herein, the first antigen-binding domain includes a light chain variable domain comprising SEQ ID NO: 441, and a heavy chain variable domain comprising: SEQ ID NO: 304, SEQ ID NO: 312, SEQ ID NO: 313, SEQ ID NO: 314, SEQ ID NO: 315, SEQ ID NO: 316, SEQ ID NO: 317, SEQ ID NO: 318, SEQ ID NO: 319, SEQ ID NO: 320, SEQ ID NO: 321, SEQ ID NO: 322, SEQ ID NO: 323, SEQ ID NO: 324, SEQ ID NO: 325, SEQ ID NO: 326, SEQ ID NO: 327, SEQ ID NO: 328, SEQ ID NO: 329, SEQ ID NO: 330, SEQ ID NO: 331, SEQ ID NO: 332, SEQ ID NO: 333, SEQ ID NO: 334, SEQ ID NO: 335, SEQ ID NO: 336, SEQ ID NO: 337, SEQ ID NO: 338, SEQ ID NO: 339, SEQ ID NO: 340, SEQ ID NO: 341, SEQ ID NO: 342, SEQ ID NO: 343, SEQ ID NO: 344, SEQ ID NO: 345, SEQ ID NO: 346, SEQ ID NO: 347, SEQ ID NO: 348, SEQ ID NO: 349, SEQ ID NO: 381, SEQ ID NO: 382, SEQ ID NO: 383, SEQ ID NO: 384, SEQ ID NO: 385, SEQ ID NO: 386, SEQ ID NO: 387, SEQ ID NO: 388, SEQ ID NO: 389, SEQ ID NO: 390, SEQ ID NO: 391, SEQ ID NO: 392, SEQ ID NO: 393, SEQ ID NO: 394, SEQ ID NO: 395, SEQ ID NO: 396, SEQ ID NO: 397, SEQ ID NO: 398, SEQ ID NO: 399, SEQ ID NO: 400, SEQ ID NO: 401, SEQ ID NO: 402, SEQ ID NO: 403, SEQ ID NO: 404, SEQ ID NO: 405, SEQ ID NO: 406, SEQ ID NO: 407, SEQ ID NO: 408, SEQ ID NO: 409, SEQ ID NO: 410, SEQ ID NO: 411, SEQ ID NO: 412, SEQ ID NO: 413, SEQ ID NO: 414, SEQ ID NO: 415, SEQ ID NO: 416, SEQ ID NO: 417, SEQ ID NO: 418, SEQ ID NO: 419, SEQ ID NO: 420, SEQ ID NO: 421, SEQ ID NO: 422, SEQ ID NO: 423, SEQ ID NO: 424, or SEQ ID NO: 425.

[0507] In some examples of any of the ABPCs described herein, the first antigen-binding domain includes a light chain variable domain comprising SEQ ID NO: 442, and a heavy chain variable domain comprising: SEQ ID NO: 304, SEQ ID NO: 312, SEQ ID NO: 313, SEQ ID NO: 314, SEQ ID NO: 315, SEQ ID NO: 316, SEQ ID NO: 317, SEQ ID NO: 318, SEQ ID NO: 319, SEQ ID NO: 320, SEQ ID NO: 321, SEQ ID NO: 322, SEQ ID NO: 323, SEQ ID NO: 324, SEQ ID NO: 325, SEQ ID NO: 326, SEQ ID NO: 327, SEQ ID NO: 328, SEQ ID NO: 329, SEQ ID NO: 330, SEQ ID NO: 331, SEQ ID NO: 332, SEQ ID NO: 333, SEQ ID NO: 334, SEQ ID NO: 335, SEQ ID NO: 336, SEQ ID NO: 337, SEQ ID NO: 338, SEQ ID NO: 339, SEQ ID NO: 340, SEQ ID NO: 341, SEQ ID NO: 342, SEQ ID NO: 343, SEQ ID NO: 344, SEQ ID NO: 345, SEQ ID NO: 346, SEQ ID NO: 347, SEQ ID NO: 348, SEQ ID NO: 349, SEQ ID NO: 381, SEQ ID NO: 382, SEQ ID NO: 383, SEQ ID NO: 384, SEQ ID NO: 385, SEQ ID NO: 386, SEQ ID NO: 387, SEQ ID NO: 388, SEQ ID NO: 389, SEQ ID NO: 390, SEQ ID NO: 391, SEQ ID NO: 392, SEQ ID NO: 393, SEQ ID NO: 394, SEQ ID NO: 395, SEQ ID NO: 396, SEQ ID NO: 397, SEQ ID NO: 398, SEQ ID NO: 399, SEQ ID NO: 400, SEQ ID NO: 401, SEQ ID NO: 402, SEQ ID NO: 403, SEQ ID NO: 404, SEQ ID NO: 405, SEQ ID NO: 406, SEQ ID NO: 407, SEQ ID NO: 408, SEQ ID NO: 409, SEQ ID NO: 410, SEQ ID NO: 411, SEQ ID NO: 412, SEQ ID NO: 413, SEQ ID NO: 414, SEQ ID NO: 415, SEQ ID NO: 416, SEQ ID NO: 417, SEQ ID NO: 418, SEQ ID NO: 419, SEQ ID NO: 420, SEQ ID NO: 421, SEQ ID NO: 422, SEQ ID NO: 423, SEQ ID NO: 424, or SEQ ID NO: 425.

[0508] In some examples of any of the ABPCs described herein, the first antigen-binding domain includes a light chain variable domain comprising SEQ ID NO: 443, and a heavy chain variable domain comprising: SEQ ID NO: 304, SEQ ID NO: 312, SEQ ID NO: 313, SEQ ID NO: 314, SEQ ID NO: 315, SEQ ID NO: 316, SEQ ID NO: 317, SEQ ID NO: 318, SEQ ID NO: 319, SEQ ID NO: 320, SEQ ID NO: 321, SEQ ID NO: 322, SEQ ID NO: 323, SEQ ID NO: 324, SEQ ID NO: 325, SEQ ID NO: 326, SEQ ID NO: 327, SEQ ID NO: 328, SEQ ID NO: 329, SEQ ID NO: 330, SEQ ID NO: 331, SEQ ID NO: 332, SEQ ID NO: 333, SEQ ID NO: 334, SEQ ID NO: 335, SEQ ID NO: 336, SEQ ID NO: 337, SEQ ID NO: 338, SEQ ID NO: 339, SEQ ID NO: 340, SEQ ID NO: 341, SEQ ID NO: 342, SEQ ID NO: 343, SEQ ID NO: 344, SEQ ID NO: 345, SEQ ID NO: 346, SEQ ID NO: 347, SEQ ID NO: 348, SEQ ID NO: 349, SEQ ID NO: 381, SEQ ID NO: 382, SEQ ID NO: 383, SEQ ID NO: 384, SEQ ID NO: 385, SEQ ID NO: 386, SEQ ID NO: 387, SEQ ID NO: 388, SEQ ID NO: 389, SEQ ID NO: 390, SEQ ID NO: 391, SEQ ID NO: 392, SEQ ID NO: 393, SEQ ID NO: 394, SEQ ID NO: 395, SEQ ID NO: 396, SEQ ID NO: 397, SEQ ID NO: 398, SEQ ID NO: 399, SEQ ID NO: 400, SEQ ID NO: 401, SEQ ID NO: 402, SEQ ID NO: 403, SEQ ID NO: 404, SEQ ID NO: 405, SEQ ID NO: 406, SEQ ID NO: 407, SEQ ID NO: 408, SEQ ID NO: 409, SEQ ID NO: 410, SEQ ID NO: 411, SEQ ID NO: 412, SEQ ID NO: 413, SEQ ID NO: 414, SEQ ID NO: 415, SEQ ID NO: 416, SEQ ID NO: 417, SEQ ID NO: 418, SEQ ID NO: 419, SEQ ID NO: 420, SEQ ID NO: 421, SEQ ID NO: 422, SEQ ID NO: 423, SEQ ID NO: 424, or SEQ ID NO: 425.

[0509] In some examples of any of the ABPCs described herein, the first antigen-binding domain includes a light chain variable domain comprising SEQ ID NO: 444, and a heavy chain variable domain comprising: SEQ ID NO: 304, SEQ ID NO: 312, SEQ ID NO: 313, SEQ ID NO: 314, SEQ ID NO: 315, SEQ ID NO: 316, SEQ ID NO: 317, SEQ ID NO: 318, SEQ ID NO: 319, SEQ ID NO: 320, SEQ ID NO: 321, SEQ ID NO: 322, SEQ ID NO: 323, SEQ ID NO: 324, SEQ ID NO: 325, SEQ ID NO: 326, SEQ ID NO: 327, SEQ ID NO: 328, SEQ ID NO: 329, SEQ ID NO: 330, SEQ ID NO: 331, SEQ ID NO: 332, SEQ ID NO: 333, SEQ ID NO: 334, SEQ ID NO: 335, SEQ ID NO: 336, SEQ ID NO: 337, SEQ ID NO: 338, SEQ ID NO: 339, SEQ ID NO: 340, SEQ ID NO: 341, SEQ ID NO: 342, SEQ ID NO: 343, SEQ ID NO: 344, SEQ ID NO: 345, SEQ ID NO: 346, SEQ ID NO: 347, SEQ ID NO: 348, SEQ ID NO: 349, SEQ ID NO: 381, SEQ ID NO: 382, SEQ ID NO: 383, SEQ ID NO: 384, SEQ ID NO: 385, SEQ ID NO: 386, SEQ ID NO: 387, SEQ ID NO: 388, SEQ ID NO: 389, SEQ ID NO: 390, SEQ ID NO: 391, SEQ ID NO: 392, SEQ ID NO: 393, SEQ ID NO: 394, SEQ ID NO: 395, SEQ ID NO: 396, SEQ ID NO: 397, SEQ ID NO: 398, SEQ ID NO: 399, SEQ ID NO: 400, SEQ ID NO: 401, SEQ ID NO: 402, SEQ ID NO: 403, SEQ ID NO: 404, SEQ ID NO: 405, SEQ ID NO: 406, SEQ ID NO: 407, SEQ ID NO: 408, SEQ ID NO: 409, SEQ ID NO: 410, SEQ ID NO: 411, SEQ ID NO: 412, SEQ ID NO: 413, SEQ ID NO: 414, SEQ ID NO: 415, SEQ ID NO: 416, SEQ ID NO: 417, SEQ ID NO: 418, SEQ ID NO: 419, SEQ ID NO: 420, SEQ ID NO: 421, SEQ ID NO: 422, SEQ ID NO: 423, SEQ ID NO: 424, or SEQ ID NO: 425.

[0510] In some examples of any of the ABPCs described herein, the first antigen-binding domain includes a light chain variable domain comprising SEQ ID NO: 445, and a heavy chain variable domain comprising: SEQ ID NO: 304, SEQ ID NO: 312, SEQ ID NO: 313, SEQ ID NO: 314, SEQ ID NO: 315, SEQ ID NO: 316, SEQ ID NO: 317, SEQ ID NO: 318, SEQ ID NO: 319, SEQ ID NO: 320, SEQ ID NO: 321, SEQ ID NO: 322, SEQ ID NO: 323, SEQ ID NO: 324, SEQ ID NO: 325, SEQ ID NO: 326, SEQ ID NO: 327, SEQ ID NO: 328, SEQ ID NO: 329, SEQ ID NO: 330, SEQ ID NO: 331, SEQ ID NO: 332, SEQ ID NO: 333, SEQ ID NO: 334, SEQ ID NO: 335, SEQ ID NO: 336, SEQ ID NO: 337, SEQ ID NO: 338, SEQ ID NO: 339, SEQ ID NO: 340, SEQ ID NO: 341, SEQ ID NO: 342, SEQ ID NO: 343, SEQ ID NO: 344, SEQ ID NO: 345, SEQ ID NO: 346, SEQ ID NO: 347, SEQ ID NO: 348, SEQ ID NO: 349, SEQ ID NO: 381, SEQ ID NO: 382, SEQ ID NO: 383, SEQ ID NO: 384, SEQ ID NO: 385, SEQ ID NO: 386, SEQ ID NO: 387, SEQ ID NO: 388, SEQ ID NO: 389, SEQ ID NO: 390, SEQ ID NO: 391, SEQ ID NO: 392, SEQ ID NO: 393, SEQ ID NO: 394, SEQ ID NO: 395, SEQ ID NO: 396, SEQ ID NO: 397, SEQ ID NO: 398, SEQ ID NO: 399, SEQ ID NO: 400, SEQ ID NO: 401, SEQ ID NO: 402, SEQ ID NO: 403, SEQ ID NO: 404, SEQ ID NO: 405, SEQ ID NO: 406, SEQ ID NO: 407, SEQ ID NO: 408, SEQ ID NO: 409, SEQ ID NO: 410, SEQ ID NO: 411, SEQ ID NO: 412, SEQ ID NO: 413, SEQ ID NO: 414, SEQ ID NO: 415, SEQ ID NO: 416, SEQ ID NO: 417, SEQ ID NO: 418, SEQ ID NO: 419, SEQ ID NO: 420, SEQ ID NO: 421, SEQ ID NO: 422, SEQ ID NO: 423, SEQ ID NO: 424, or SEQ ID NO: 425.

[0511] In some examples of any of the ABPCs described herein, the first antigen-binding domain includes a light chain variable domain comprising SEQ ID NO: 446, and a heavy SEQ ID NO: 314, SEQ ID NO: 315, SEQ ID NO: 316, SEQ ID NO: 317, SEQ ID NO: 318, SEQ ID NO: 319, SEQ ID NO: 320, SEQ ID NO: 321, SEQ ID NO: 322, SEQ ID NO: 323, SEQ ID NO: 324, SEQ ID NO: 325, SEQ ID NO: 326, SEQ ID NO: 327, SEQ ID NO: 328, SEQ ID NO: 329, SEQ ID NO: 330, SEQ ID NO: 331, SEQ ID NO: 332, SEQ ID NO: 333, SEQ ID NO: 334, SEQ ID NO: 335, SEQ ID NO: 336, SEQ ID NO: 337, SEQ ID NO: 338, SEQ ID NO: 339, SEQ ID NO: 340, SEQ ID NO: 341, SEQ ID NO: 342, SEQ ID NO: 343, SEQ ID NO: 344, SEQ ID NO: 345, SEQ ID NO: 346, SEQ ID NO: 347, SEQ ID NO: 348, SEQ ID NO: 349, SEQ ID NO: 381, SEQ ID NO: 382, SEQ ID NO: 383, SEQ ID NO: 384, SEQ ID NO: 385, SEQ ID NO: 386, SEQ ID NO: 387, SEQ ID NO: 388, SEQ ID NO: 389, SEQ ID NO: 390, SEQ ID NO: 391, SEQ ID NO: 392, SEQ ID NO: 393, SEQ ID NO: 394, SEQ ID NO: 395, SEQ ID NO: 396, SEQ ID NO: 397, SEQ ID NO: 398, SEQ ID NO: 399, SEQ ID NO: 400, SEQ ID NO: 401, SEQ ID NO: 402, SEQ ID NO: 403, SEQ ID NO: 404, SEQ ID NO: 405, SEQ ID NO: 406, SEQ ID NO: 407, SEQ ID NO: 408, SEQ ID NO: 409, SEQ ID NO: 410, SEQ ID NO: 411, SEQ ID NO: 412, SEQ ID NO: 413, SEQ ID NO: 414, SEQ ID NO: 415, SEQ ID NO: 416, SEQ ID NO: 417, SEQ ID NO: 418, SEQ ID NO: 419, SEQ ID NO: 420, SEQ ID NO: 421, SEQ ID NO: 422, SEQ ID NO: 423, SEQ ID NO: 424, or SEQ ID NO: 425.

[0512] In some examples of any of the ABPCs described herein, the first antigen-binding domain includes a light chain variable domain comprising SEQ ID NO: 447, and a heavy chain variable domain comprising: SEQ ID NO: 304, SEQ ID NO: 312, SEQ ID NO: 313, SEQ ID NO: 314, SEQ ID NO: 315, SEQ ID NO: 316, SEQ ID NO: 317, SEQ ID NO: 318, SEQ ID NO: 319, SEQ ID NO: 320, SEQ ID NO: 321, SEQ ID NO: 322, SEQ ID NO: 323, SEQ ID NO: 324, SEQ ID NO: 325, SEQ ID NO: 326, SEQ ID NO: 327, SEQ ID NO: 328, SEQ ID NO: 329, SEQ ID NO: 330, SEQ ID NO: 331, SEQ ID NO: 332, SEQ ID NO: 333, SEQ ID NO: 334, SEQ ID NO: 335, SEQ ID NO: 336, SEQ ID NO: 337, SEQ ID NO: 338, SEQ ID NO: 339, SEQ ID NO: 340, SEQ ID NO: 341, SEQ ID NO: 342, SEQ ID NO: 343, SEQ ID NO: 344, SEQ ID NO: 345, SEQ ID NO: 346, SEQ ID NO: 347, SEQ ID NO: 348, SEQ ID NO: 349, SEQ ID NO: 381, SEQ ID NO: 382, SEQ ID NO: 383, SEQ ID NO: 384, SEQ ID NO: 385, SEQ ID NO: 386, SEQ ID NO: 387, SEQ ID NO: 388, SEQ ID NO: 389, SEQ ID NO: 390, SEQ ID NO: 391, SEQ ID NO: 392, SEQ ID NO: 393, SEQ ID NO: 394, SEQ ID NO: 395, SEQ ID NO: 396, SEQ ID NO: 397, SEQ ID NO: 398, SEQ ID NO: 399, SEQ ID NO: 400, SEQ ID NO: 401, SEQ ID NO: 402, SEQ ID NO: 403, SEQ ID NO: 404, SEQ ID NO: 405, SEQ ID NO: 406, SEQ ID NO: 407, SEQ ID NO: 408, SEQ ID NO: 409, SEQ ID NO: 410, SEQ ID NO: 411, SEQ ID NO: 412, SEQ ID NO: 413, SEQ ID NO: 414, SEQ ID NO: 415, SEQ ID NO: 416, SEQ ID NO: 417, SEQ ID NO: 418, SEQ ID NO: 419, SEQ ID NO: 420, SEQ ID NO: 421, SEQ ID NO: 422, SEQ ID NO: 423, SEQ ID NO: 424, or SEQ ID NO: 425.

[0513] In some examples of any of the ABPCs described herein, the first antigen-binding domain includes a light chain variable domain comprising SEQ ID NO: 448, and a heavy chain variable domain comprising: SEQ ID NO: 304, SEQ ID NO: 312, SEQ ID NO: 313, SEQ ID NO: 314, SEQ ID NO: 315, SEQ ID NO: 316, SEQ ID NO: 317, SEQ ID NO: 318, SEQ ID NO: 319, SEQ ID NO: 320, SEQ ID NO: 321, SEQ ID NO: 322, SEQ ID NO: 323, SEQ ID NO: 324, SEQ ID NO: 325, SEQ ID NO: 326, SEQ ID NO: 327, SEQ ID NO: 328, SEQ ID NO: 329, SEQ ID NO: 330, SEQ ID NO: 331, SEQ ID NO: 332, SEQ ID NO: 333, SEQ ID NO: 334, SEQ ID NO: 335, SEQ ID NO: 336, SEQ ID NO: 337, SEQ ID NO: 338, SEQ ID NO: 339, SEQ ID NO: 340, SEQ ID NO: 341, SEQ ID NO: 342, SEQ ID NO: 343, SEQ ID NO: 344, SEQ ID NO: 345, SEQ ID NO: 346, SEQ ID NO: 347, SEQ ID NO: 348, SEQ ID NO: 349, SEQ ID NO: 381, SEQ ID NO: 382, SEQ ID NO: 383, SEQ ID NO: 384, SEQ ID NO: 385, SEQ ID NO: 386, SEQ ID NO: 387, SEQ ID NO: 388, SEQ ID NO: 389, SEQ ID NO: 390, SEQ ID NO: 391, SEQ ID NO: 392, SEQ ID NO: 393, SEQ ID NO: 394, SEQ ID NO: 395, SEQ ID NO: 396, SEQ ID NO: 397, SEQ ID NO: 398, SEQ ID NO: 399, SEQ ID NO: 400, SEQ ID NO: 401, SEQ ID NO: 402, SEQ ID NO: 403, SEQ ID NO: 404, SEQ ID NO: 405, SEQ ID NO: 406, SEQ ID NO: 407, SEQ ID NO: 408, SEQ ID NO: 409, SEQ ID NO: 410, SEQ ID NO: 411, SEQ ID NO: 412, SEQ ID NO: 413, SEQ ID NO: 414, SEQ ID NO: 415, SEQ ID NO: 416, SEQ ID NO: 417, SEQ ID NO: 418, SEQ ID NO: 419, SEQ ID NO: 420, SEQ ID NO: 421, SEQ ID NO: 422, SEQ ID NO: 423, SEQ ID NO: 424, or SEQ ID NO: 425.

[0514] In some examples of any of the ABPCs described herein, the first antigen-binding domain includes a light chain variable domain comprising SEQ ID NO: 449, and a heavy chain variable domain comprising: SEQ ID NO: 304, SEQ ID NO: 312, SEQ ID NO: 313, SEQ ID NO: 314, SEQ ID NO: 315, SEQ ID NO: 316, SEQ ID NO: 317, SEQ ID NO: 318, SEQ ID NO: 319, SEQ ID NO: 320, SEQ ID NO: 321, SEQ ID NO: 322, SEQ ID NO: 323, SEQ ID NO: 324, SEQ ID NO: 325, SEQ ID NO: 326, SEQ ID NO: 327, SEQ ID NO: 328, SEQ ID NO: 329, SEQ ID NO: 330, SEQ ID NO: 331, SEQ ID NO: 332, SEQ ID NO: 333, SEQ ID NO: 334, SEQ ID NO: 335, SEQ ID NO: 336, SEQ ID NO: 337, SEQ ID NO: 338, SEQ ID NO: 339, SEQ ID NO: 340, SEQ ID NO: 341, SEQ ID NO: 342, SEQ ID NO: 343, SEQ ID NO: 344, SEQ ID NO: 345, SEQ ID NO: 346, SEQ ID NO: 347, SEQ ID NO: 348, SEQ ID NO: 349, SEQ ID NO: 381, SEQ ID NO: 382, SEQ ID NO: 383, SEQ ID NO: 384, SEQ ID NO: 385, SEQ ID NO: 386, SEQ ID NO: 387, SEQ ID NO: 388, SEQ ID NO: 389, SEQ ID NO: 390, SEQ ID NO: 391, SEQ ID NO: 392, SEQ ID NO: 393, SEQ ID NO: 394, SEQ ID NO: 395, SEQ ID NO: 396, SEQ ID NO: 397, SEQ ID NO: 398, SEQ ID NO: 399, SEQ ID NO: 400, SEQ ID NO: 401, SEQ ID NO: 402, SEQ ID NO: 403, SEQ ID NO: 404, SEQ ID NO: 405, SEQ ID NO: 406, SEQ ID NO: 407, SEQ ID NO: 408, SEQ ID NO: 409, SEQ ID NO: 410, SEQ ID NO: 411, SEQ ID NO: 412, SEQ ID NO: 413, SEQ ID NO: 414, SEQ ID NO: 415, SEQ ID NO: 416, SEQ ID NO: 417, SEQ ID NO: 418, SEQ ID NO: 419, SEQ ID NO: 420, SEQ ID NO: 421, SEQ ID NO: 422, SEQ ID NO: 423, SEQ ID NO: 424, or SEQ ID NO: 425.

[0515] In some examples of any of the ABPCs described herein, the first antigen-binding domain includes a light chain variable domain comprising SEQ ID NO: 450, and a heavy chain variable domain comprising: SEQ ID NO: 304, SEQ ID NO: 312, SEQ ID NO: 313, SEQ ID NO: 314, SEQ ID NO: 315, SEQ ID NO: 316, SEQ ID NO: 317, SEQ ID NO: 318, SEQ ID NO: 319, SEQ ID NO: 320, SEQ ID NO: 321, SEQ ID NO: 322, SEQ ID NO: 323, SEQ ID NO: 324, SEQ ID NO: 325, SEQ ID NO: 326, SEQ ID NO: 327, SEQ ID NO: 328, SEQ ID NO: 329, SEQ ID NO: 330, SEQ ID NO: 331, SEQ ID NO: 332, SEQ ID NO: 333, SEQ ID NO: 334, SEQ ID NO: 335, SEQ ID NO: 336, SEQ ID NO: 337, SEQ ID NO: 338, SEQ ID NO: 339, SEQ ID NO: 340, SEQ ID NO: 341, SEQ ID NO: 342, SEQ ID NO: 343, SEQ ID NO: 344, SEQ ID NO: 345, SEQ ID NO: 346, SEQ ID NO: 347, SEQ ID NO: 348, SEQ ID NO: 349, SEQ ID NO: 381, SEQ ID NO: 382, SEQ ID NO: 383, SEQ ID NO: 384, SEQ ID NO: 385, SEQ ID NO: 386, SEQ ID NO: 387, SEQ ID NO: 388, SEQ ID NO: 389, SEQ ID NO: 390, SEQ ID NO: 391, SEQ ID NO: 392, SEQ ID NO: 393, SEQ ID NO: 394, SEQ ID NO: 395, SEQ ID NO: 396, SEQ ID NO: 397, SEQ ID NO: 398, SEQ ID NO: 399, SEQ ID NO: 400, SEQ ID NO: 401, SEQ ID NO: 402, SEQ ID NO: 403, SEQ ID NO: 404, SEQ ID NO: 405, SEQ ID NO: 406, SEQ ID NO: 407, SEQ ID NO: 408, SEQ ID NO: 409, SEQ ID NO: 410, SEQ ID NO: 411, SEQ ID NO: 412, SEQ ID NO: 413, SEQ ID NO: 414, SEQ ID NO: 415, SEQ ID NO: 416, SEQ ID NO: 417, SEQ ID NO: 418, SEQ ID NO: 419, SEQ ID NO: 420, SEQ ID NO: 421, SEQ ID NO: 422, SEQ ID NO: 423, SEQ ID NO: 424, or SEQ ID NO: 425.

[0516] In some examples of any of the ABPCs described herein, the first antigen-binding domain includes a light chain variable domain comprising SEQ ID NO: 451, and a heavy chain variable domain comprising: SEQ ID NO: 304, SEQ ID NO: 312, SEQ ID NO: 313, SEQ ID NO: 314, SEQ ID NO: 315, SEQ ID NO: 316, SEQ ID NO: 317, SEQ ID NO: 318, SEQ ID NO: 319, SEQ ID NO: 320, SEQ ID NO: 321, SEQ ID NO: 322, SEQ ID NO: 323, SEQ ID NO: 324, SEQ ID NO: 325, SEQ ID NO: 326, SEQ ID NO: 327, SEQ ID NO: 328, SEQ ID NO: 329, SEQ ID NO: 330, SEQ ID NO: 331, SEQ ID NO: 332, SEQ ID NO: 333, SEQ ID NO: 334, SEQ ID NO: 335, SEQ ID NO: 336, SEQ ID NO: 337, SEQ ID NO: 338, SEQ ID NO: 339, SEQ ID NO: 340, SEQ ID NO: 341, SEQ ID NO: 342, SEQ ID NO: 343, SEQ ID NO: 344, SEQ ID NO: 345, SEQ ID NO: 346, SEQ ID NO: 347, SEQ ID NO: 348, SEQ ID NO: 349, SEQ ID NO: 381, SEQ ID NO: 382, SEQ ID NO: 383, SEQ ID NO: 384, SEQ ID NO: 385, SEQ ID NO: 386, SEQ ID NO: 387, SEQ ID NO: 388, SEQ ID NO: 389, SEQ ID NO: 390, SEQ ID NO: 391, SEQ ID NO: 392, SEQ ID NO: 393, SEQ ID NO: 394, SEQ ID NO: 395, SEQ ID NO: 396, SEQ ID NO: 397, SEQ ID NO: 398, SEQ ID NO: 399, SEQ ID NO: 400, SEQ ID NO: 401, SEQ ID NO: 402, SEQ ID NO: 403, SEQ ID NO: 404, SEQ ID NO: 405, SEQ ID NO: 406, SEQ ID NO: 407, SEQ ID NO: 408, SEQ ID NO: 409, SEQ ID NO: 410, SEQ ID NO: 411, SEQ ID NO: 412, SEQ ID NO: 413, SEQ ID NO: 414, SEQ ID NO: 415, SEQ ID NO: 416, SEQ ID NO: 417, SEQ ID NO: 418, SEQ ID NO: 419, SEQ ID NO: 420, SEQ ID NO: 421, SEQ ID NO: 422, SEQ ID NO: 423, SEQ ID NO: 424, or SEQ ID NO: 425.

[0517] In some examples of any of the ABPCs described herein, the first antigen-binding domain includes a light chain variable domain comprising SEQ ID NO: 452, and a heavy chain variable domain comprising: SEQ ID NO: 304, SEQ ID NO: 312, SEQ ID NO: 313, SEQ ID NO: 314, SEQ ID NO: 315, SEQ ID NO: 316, SEQ ID NO: 317, SEQ ID NO: 318, SEQ ID NO: 319, SEQ ID NO: 320, SEQ ID NO: 321, SEQ ID NO: 322, SEQ ID NO: 323, SEQ ID NO: 324, SEQ ID NO: 325, SEQ ID NO: 326, SEQ ID NO: 327, SEQ ID NO: 328, SEQ ID NO: 329, SEQ ID NO: 330, SEQ ID NO: 331, SEQ ID NO: 332, SEQ ID NO: 333, SEQ ID NO: 334, SEQ ID NO: 335, SEQ ID NO: 336, SEQ ID NO: 337, SEQ ID NO: 338, SEQ ID NO: 339, SEQ ID NO: 340, SEQ ID NO: 341, SEQ ID NO: 342, SEQ ID NO: 343, SEQ ID NO: 344, SEQ ID NO: 345, SEQ ID NO: 346, SEQ ID NO: 347, SEQ ID NO: 348, SEQ ID NO: 349, SEQ ID NO: 381, SEQ ID NO: 382, SEQ ID NO: 383, SEQ ID NO: 384, SEQ ID NO: 385, SEQ ID NO: 386, SEQ ID NO: 387, SEQ ID NO: 388, SEQ ID NO: 389, SEQ ID NO: 390, SEQ ID NO: 391, SEQ ID NO: 392, SEQ ID NO: 393, SEQ ID NO: 394, SEQ ID NO: 395, SEQ ID NO: 396, SEQ ID NO: 397, SEQ ID NO: 398, SEQ ID NO: 399, SEQ ID NO: 400, SEQ ID NO: 401, SEQ ID NO: 402, SEQ ID NO: 403, SEQ ID NO: 404, SEQ ID NO: 405, SEQ ID NO: 406, SEQ ID NO: 407, SEQ ID NO: 408, SEQ ID NO: 409, SEQ ID NO: 410, SEQ ID NO: 411, SEQ ID NO: 412, SEQ ID NO: 413, SEQ ID NO: 414, SEQ ID NO: 415, SEQ ID NO: 416, SEQ ID NO: 417, SEQ ID NO: 418, SEQ ID NO: 419, SEQ ID NO: 420, SEQ ID NO: 421, SEQ ID NO: 422, SEQ ID NO: 423, SEQ ID NO: 424, or SEQ ID NO: 425.

[0518] In some examples of any of the ABPCs described herein, the first antigen-binding domain includes a light chain variable domain comprising SEQ ID NO: 453, and a heavy chain variable domain comprising: SEQ ID NO: 304, SEQ ID NO: 312, SEQ ID NO: 313, SEQ ID NO: 314, SEQ ID NO: 315, SEQ ID NO: 316, SEQ ID NO: 317, SEQ ID NO: 318, SEQ ID NO: 319, SEQ ID NO: 320, SEQ ID NO: 321, SEQ ID NO: 322, SEQ ID NO: 323, SEQ ID NO: 324, SEQ ID NO: 325, SEQ ID NO: 326, SEQ ID NO: 327, SEQ ID NO: 328, SEQ ID NO: 329, SEQ ID NO: 330, SEQ ID NO: 331, SEQ ID NO: 332, SEQ ID NO: 333, SEQ ID NO: 334, SEQ ID NO: 335, SEQ ID NO: 336, SEQ ID NO: 337, SEQ ID NO: 338, SEQ ID NO: 339, SEQ ID NO: 340, SEQ ID NO: 341, SEQ ID NO: 342, SEQ ID NO: 343, SEQ ID NO: 344, SEQ ID NO: 345, SEQ ID NO: 346, SEQ ID NO: 347, SEQ ID NO: 348, SEQ ID NO: 349, SEQ ID NO: 381, SEQ ID NO: 382, SEQ ID NO: 383, SEQ ID NO: 384, SEQ ID NO: 385, SEQ ID NO: 386, SEQ ID NO: 387, SEQ ID NO: 388, SEQ ID NO: 389, SEQ ID NO: 390, SEQ ID NO: 391, SEQ ID NO: 392, SEQ ID NO: 393, SEQ ID NO: 394, SEQ ID NO: 395, SEQ ID NO: 396, SEQ ID NO: 397, SEQ ID NO: 398, SEQ ID NO: 399, SEQ ID NO: 400, SEQ ID NO: 401, SEQ ID NO: 402, SEQ ID NO: 403, SEQ ID NO: 404, SEQ ID NO: 405, SEQ ID NO: 406, SEQ ID NO: 407, SEQ ID NO: 408, SEQ ID NO: 409, SEQ ID NO: 410, SEQ ID NO: 411, SEQ ID NO: 412, SEQ ID NO: 413, SEQ ID NO: 414, SEQ ID NO: 415, SEQ ID NO: 416, SEQ ID NO: 417, SEQ ID NO: 418, SEQ ID NO: 419, SEQ ID NO: 420, SEQ ID NO: 421, SEQ ID NO: 422, SEQ ID NO: 423, SEQ ID NO: 424, or SEQ ID NO: 425.

[0519] In some examples of any of the ABPCs described herein, the first antigen-binding domain includes a light chain variable domain comprising SEQ ID NO: 454, and a heavy chain variable domain comprising: SEQ ID NO: 304, SEQ ID NO: 312, SEQ ID NO: 313, SEQ ID NO: 314, SEQ ID NO: 315, SEQ ID NO: 316, SEQ ID NO: 317, SEQ ID NO: 318, SEQ ID NO: 319, SEQ ID NO: 320, SEQ ID NO: 321, SEQ ID NO: 322, SEQ ID NO: 323, SEQ ID NO: 324, SEQ ID NO: 325, SEQ ID NO: 326, SEQ ID NO: 327, SEQ ID NO: 328, SEQ ID NO: 329, SEQ ID NO: 330, SEQ ID NO: 331, SEQ ID NO: 332, SEQ ID NO: 333, SEQ ID NO: 334, SEQ ID NO: 335, SEQ ID NO: 336, SEQ ID NO: 337, SEQ ID NO: 338, SEQ ID NO: 339, SEQ ID NO: 340, SEQ ID NO: 341, SEQ ID NO: 342, SEQ ID NO: 343, SEQ ID NO: 344, SEQ ID NO: 345, SEQ ID NO: 346, SEQ ID NO: 347, SEQ ID NO: 348, SEQ ID NO: 349, SEQ ID NO: 381, SEQ ID NO: 382, SEQ ID NO: 383, SEQ ID NO: 384, SEQ ID NO: 385, SEQ ID NO: 386, SEQ ID NO: 387, SEQ ID NO: 388, SEQ ID NO: 389, SEQ ID NO: 390, SEQ ID NO: 391, SEQ ID NO: 392, SEQ ID NO: 393, SEQ ID NO: 394, SEQ ID NO: 395, SEQ ID NO: 396, SEQ ID NO: 397, SEQ ID NO: 398, SEQ ID NO: 399, SEQ ID NO: 400, SEQ ID NO: 401, SEQ ID NO: 402, SEQ ID NO: 403, SEQ ID NO: 404, SEQ ID NO: 405, SEQ ID NO: 406, SEQ ID NO: 407, SEQ ID NO: 408, SEQ ID NO: 409, SEQ ID NO: 410, SEQ ID NO: 411, SEQ ID NO: 412, SEQ ID NO: 413, SEQ ID NO: 414, SEQ ID NO: 415, SEQ ID NO: 416, SEQ ID NO: 417, SEQ ID NO: 418, SEQ ID NO: 419, SEQ ID NO: 420, SEQ ID NO: 421, SEQ ID NO: 422, SEQ ID NO: 423, SEQ ID NO: 424, or SEQ ID NO: 425.

[0520] In some examples of any of the ABPCs described herein, the first antigen-binding domain includes a light chain variable domain comprising SEQ ID NO: 455, and a heavy chain variable domain comprising: SEQ ID NO: 304, SEQ ID NO: 312, SEQ ID NO: 313, SEQ ID NO: 314, SEQ ID NO: 315, SEQ ID NO: 316, SEQ ID NO: 317, SEQ ID NO: 318, SEQ ID NO: 319, SEQ ID NO: 320, SEQ ID NO: 321, SEQ ID NO: 322, SEQ ID NO: 323, SEQ ID NO: 324, SEQ ID NO: 325, SEQ ID NO: 326, SEQ ID NO: 327, SEQ ID NO: 328, SEQ ID NO: 329, SEQ ID NO: 330, SEQ ID NO: 331, SEQ ID NO: 332, SEQ ID NO: 333, SEQ ID NO: 334, SEQ ID NO: 335, SEQ ID NO: 336, SEQ ID NO: 337, SEQ ID NO: 338, SEQ ID NO: 339, SEQ ID NO: 340, SEQ ID NO: 341, SEQ ID NO: 342, SEQ ID NO: 343, SEQ ID NO: 344, SEQ ID NO: 345, SEQ ID NO: 346, SEQ ID NO: 347, SEQ ID NO: 348, SEQ ID NO: 349, SEQ ID NO: 381, SEQ ID NO: 382, SEQ ID NO: 383, SEQ ID NO: 384, SEQ ID NO: 385, SEQ ID NO: 386, SEQ ID NO: 387, SEQ ID NO: 388, SEQ ID NO: 389, SEQ ID NO: 390, SEQ ID NO: 391, SEQ ID NO: 392, SEQ ID NO: 393, SEQ ID NO: 394, SEQ ID NO: 395, SEQ ID NO: 396, SEQ ID NO: 397, SEQ ID NO: 398, SEQ ID NO: 399, SEQ ID NO: 400, SEQ ID NO: 401, SEQ ID NO: 402, SEQ ID NO: 403, SEQ ID NO: 404, SEQ ID NO: 405, SEQ ID NO: 406, SEQ ID NO: 407, SEQ ID NO: 408, SEQ ID NO: 409, SEQ ID NO: 410, SEQ ID NO: 411, SEQ ID NO: 412, SEQ ID NO: 413, SEQ ID NO: 414, SEQ ID NO: 415, SEQ ID NO: 416, SEQ ID NO: 417, SEQ ID NO: 418, SEQ ID NO: 419, SEQ ID NO: 420, SEQ ID NO: 421, SEQ ID NO: 422, SEQ ID NO: 423, SEQ ID NO: 424, or SEQ ID NO: 425.

[0521] In some examples of any of the ABPCs described herein, the first antigen-binding domain includes a light chain variable domain comprising SEQ ID NO: 456, and a heavy chain variable domain comprising: SEQ ID NO: 304, SEQ ID NO: 312, SEQ ID NO: 313, SEQ ID NO: 314, SEQ ID NO: 315, SEQ ID NO: 316, SEQ ID NO: 317, SEQ ID NO: 318, SEQ ID NO: 319, SEQ ID NO: 320, SEQ ID NO: 321, SEQ ID NO: 322, SEQ ID NO: 323, SEQ ID NO: 324, SEQ ID NO: 325, SEQ ID NO: 326, SEQ ID NO: 327, SEQ ID NO: 328, SEQ ID NO: 329, SEQ ID NO: 330, SEQ ID NO: 331, SEQ ID NO: 332, SEQ ID NO: 333, SEQ ID NO: 334, SEQ ID NO: 335, SEQ ID NO: 336, SEQ ID NO: 337, SEQ ID NO: 338, SEQ ID NO: 339, SEQ ID NO: 340, SEQ ID NO: 341, SEQ ID NO: 342, SEQ ID NO: 343, SEQ ID NO: 344, SEQ ID NO: 345, SEQ ID NO: 346, SEQ ID NO: 347, SEQ ID NO: 348, SEQ ID NO: 349, SEQ ID NO: 381, SEQ ID NO: 382, SEQ ID NO: 383, SEQ ID NO: 384, SEQ ID NO: 385, SEQ ID NO: 386, SEQ ID NO: 387, SEQ ID NO: 388, SEQ ID NO: 389, SEQ ID NO: 390, SEQ ID NO: 391, SEQ ID NO: 392, SEQ ID NO: 393, SEQ ID NO: 394, SEQ ID NO: 395, SEQ ID NO: 396, SEQ ID NO: 397, SEQ ID NO: 398, SEQ ID NO: 399, SEQ ID NO: 400, SEQ ID NO: 401, SEQ ID NO: 402, SEQ ID NO: 403, SEQ ID NO: 404, SEQ ID NO: 405, SEQ ID NO: 406, SEQ ID NO: 407, SEQ ID NO: 408, SEQ ID NO: 409, SEQ ID NO: 410, SEQ ID NO: 411, SEQ ID NO: 412, SEQ ID NO: 413, SEQ ID NO: 414, SEQ ID NO: 415, SEQ ID NO: 416, SEQ ID NO: 417, SEQ ID NO: 418, SEQ ID NO: 419, SEQ ID NO: 420, SEQ ID NO: 421, SEQ ID NO: 422, SEQ ID NO: 423, SEQ ID NO: 424, or SEQ ID NO: 425.

[0522] In some examples of any of the ABPCs described herein, the first antigen-binding domain includes a light chain variable domain comprising SEQ ID NO: 457, and a heavy chain variable domain comprising: SEQ ID NO: 304, SEQ ID NO: 312, SEQ ID NO: 313, SEQ ID NO: 314, SEQ ID NO: 315, SEQ ID NO: 316, SEQ ID NO: 317, SEQ ID NO: 318, SEQ ID NO: 319, SEQ ID NO: 320, SEQ ID NO: 321, SEQ ID NO: 322, SEQ ID NO: 323, SEQ ID NO: 324, SEQ ID NO: 325, SEQ ID NO: 326, SEQ ID NO: 327, SEQ ID NO: 328, SEQ ID NO: 329, SEQ ID NO: 330, SEQ ID NO: 331, SEQ ID NO: 332, SEQ ID NO: 333, SEQ ID NO: 334, SEQ ID NO: 335, SEQ ID NO: 336, SEQ ID NO: 337, SEQ ID NO: 338, SEQ ID NO: 339, SEQ ID NO: 340, SEQ ID NO: 341, SEQ ID NO: 342, SEQ ID NO: 343, SEQ ID NO: 344, SEQ ID NO: 345, SEQ ID NO: 346, SEQ ID NO: 347, SEQ ID NO: 348, SEQ ID NO: 349, SEQ ID NO: 381, SEQ ID NO: 382, SEQ ID NO: 383, SEQ ID NO: 384, SEQ ID NO: 385, SEQ ID NO: 386, SEQ ID NO: 387, SEQ ID NO: 388, SEQ ID NO: 389, SEQ ID NO: 390, SEQ ID NO: 391, SEQ ID NO: 392, SEQ ID NO: 393, SEQ ID NO: 394, SEQ ID NO: 395, SEQ ID NO: 396, SEQ ID NO: 397, SEQ ID NO: 398, SEQ ID NO: 399, SEQ ID NO: 400, SEQ ID NO: 401, SEQ ID NO: 402, SEQ ID NO: 403, SEQ ID NO: 404, SEQ ID NO: 405, SEQ ID NO: 406, SEQ ID NO: 407, SEQ ID NO: 408, SEQ ID NO: 409, SEQ ID NO: 410, SEQ ID NO: 411, SEQ ID NO: 412, SEQ ID NO: 413, SEQ ID NO: 414, SEQ ID NO: 415, SEQ ID NO: 416, SEQ ID NO: 417, SEQ ID NO: 418, SEQ ID NO: 419, SEQ ID NO: 420, SEQ ID NO: 421, SEQ ID NO: 422, SEQ ID NO: 423, SEQ ID NO: 424, or SEQ ID NO: 425.

[0523] In some examples of any of the ABPCs described herein, the first antigen-binding domain includes a light chain variable domain comprising SEQ ID NO: 458, and a heavy chain variable domain comprising: SEQ ID NO: 304, SEQ ID NO: 312, SEQ ID NO: 313, SEQ ID NO: 314, SEQ ID NO: 315, SEQ ID NO: 316, SEQ ID NO: 317, SEQ ID NO: 318, SEQ ID NO: 319, SEQ ID NO: 320, SEQ ID NO: 321, SEQ ID NO: 322, SEQ ID NO: 323, SEQ ID NO: 324, SEQ ID NO: 325, SEQ ID NO: 326, SEQ ID NO: 327, SEQ ID NO: 328, SEQ ID NO: 329, SEQ ID NO: 330, SEQ ID NO: 331, SEQ ID NO: 332, SEQ ID NO: 333, SEQ ID NO: 334, SEQ ID NO: 335, SEQ ID NO: 336, SEQ ID NO: 337, SEQ ID NO: 338, SEQ ID NO: 339, SEQ ID NO: 340, SEQ ID NO: 341, SEQ ID NO: 342, SEQ ID NO: 343, SEQ ID NO: 344, SEQ ID NO: 345, SEQ ID NO: 346, SEQ ID NO: 347, SEQ ID NO: 348, SEQ ID NO: 349, SEQ ID NO: 381, SEQ ID NO: 382, SEQ ID NO: 383, SEQ ID NO: 384, SEQ ID NO: 385, SEQ ID NO: 386, SEQ ID NO: 387, SEQ ID NO: 388, SEQ ID NO: 389, SEQ ID NO: 390, SEQ ID NO: 391, SEQ ID NO: 392, SEQ ID NO: 393, SEQ ID NO: 394, SEQ ID NO: 395, SEQ ID NO: 396, SEQ ID NO: 397, SEQ ID NO: 398, SEQ ID NO: 399, SEQ ID NO: 400, SEQ ID NO: 401, SEQ ID NO: 402, SEQ ID NO: 403, SEQ ID NO: 404, SEQ ID NO: 405, SEQ ID NO: 406, SEQ ID NO: 407, SEQ ID NO: 408, SEQ ID NO: 409, SEQ ID NO: 410, SEQ ID NO: 411, SEQ ID NO: 412, SEQ ID NO: 413, SEQ ID NO: 414, SEQ ID NO: 415, SEQ ID NO: 416, SEQ ID NO: 417, SEQ ID NO: 418, SEQ ID NO: 419, SEQ ID NO: 420, SEQ ID NO: 421, SEQ ID NO: 422, SEQ ID NO: 423, SEQ ID NO: 424, or SEQ ID NO: 425.

[0524] In some examples of any of the ABPCs described herein, the first antigen-binding domain includes a light chain variable domain comprising SEQ ID NO: 459, and a heavy chain variable domain comprising: SEQ ID NO: 304, SEQ ID NO: 312, SEQ ID NO: 313, SEQ ID NO: 314, SEQ ID NO: 315, SEQ ID NO: 316, SEQ ID NO: 317, SEQ ID NO: 318, SEQ ID NO: 319, SEQ ID NO: 320, SEQ ID NO: 321, SEQ ID NO: 322, SEQ ID NO: 323, SEQ ID NO: 324, SEQ ID NO: 325, SEQ ID NO: 326, SEQ ID NO: 327, SEQ ID NO: 328, SEQ ID NO: 329, SEQ ID NO: 330, SEQ ID NO: 331, SEQ ID NO: 332, SEQ ID NO: 333, SEQ ID NO: 334, SEQ ID NO: 335, SEQ ID NO: 336, SEQ ID NO: 337, SEQ ID NO: 338, SEQ ID NO: 339, SEQ ID NO: 340, SEQ ID NO: 341, SEQ ID NO: 342, SEQ ID NO: 343, SEQ ID NO: 344, SEQ ID NO: 345, SEQ ID NO: 346, SEQ ID NO: 347, SEQ ID NO: 348, SEQ ID NO: 349, SEQ ID NO: 381, SEQ ID NO: 382, SEQ ID NO: 383, SEQ ID NO: 384, SEQ ID NO: 385, SEQ ID NO: 386, SEQ ID NO: 387, SEQ ID NO: 388, SEQ ID NO: 389, SEQ ID NO: 390, SEQ ID NO: 391, SEQ ID NO: 392, SEQ ID NO: 393, SEQ ID NO: 394, SEQ ID NO: 395, SEQ ID NO: 396, SEQ ID NO: 397, SEQ ID NO: 398, SEQ ID NO: 399, SEQ ID NO: 400, SEQ ID NO: 401, SEQ ID NO: 402, SEQ ID NO: 403, SEQ ID NO: 404, SEQ ID NO: 405, SEQ ID NO: 406, SEQ ID NO: 407, SEQ ID NO: 408, SEQ ID NO: 409, SEQ ID NO: 410, SEQ ID NO: 411, SEQ ID NO: 412, SEQ ID NO: 413, SEQ ID NO: 414, SEQ ID NO: 415, SEQ ID NO: 416, SEQ ID NO: 417, SEQ ID NO: 418, SEQ ID NO: 419, SEQ ID NO: 420, SEQ ID NO: 421, SEQ ID NO: 422, SEQ ID NO: 423, SEQ ID NO: 424, or SEQ ID NO: 425.

[0525] In some examples of any of the ABPCs described herein, the first antigen-binding domain includes a light chain variable domain comprising SEQ ID NO: 460, and a heavy chain variable domain comprising: SEQ ID NO: 304, SEQ ID NO: 312, SEQ ID NO: 313, SEQ ID NO: 314, SEQ ID NO: 315, SEQ ID NO: 316, SEQ ID NO: 317, SEQ ID NO: 318, SEQ ID NO: 319, SEQ ID NO: 320, SEQ ID NO: 321, SEQ ID NO: 322, SEQ ID NO: 323, SEQ ID NO: 324, SEQ ID NO: 325, SEQ ID NO: 326, SEQ ID NO: 327, SEQ ID NO: 328, SEQ ID NO: 329, SEQ ID NO: 330, SEQ ID NO: 331, SEQ ID NO: 332, SEQ ID NO: 333, SEQ ID NO: 334, SEQ ID NO: 335, SEQ ID NO: 336, SEQ ID NO: 337, SEQ ID NO: 338, SEQ ID NO: 339, SEQ ID NO: 340, SEQ ID NO: 341, SEQ ID NO: 342, SEQ ID NO: 343, SEQ ID NO: 344, SEQ ID NO: 345, SEQ ID NO: 346, SEQ ID NO: 347, SEQ ID NO: 348, SEQ ID NO: 349, SEQ ID NO: 381, SEQ ID NO: 382, SEQ ID NO: 383, SEQ ID NO: 384, SEQ ID NO: 385, SEQ ID NO: 386, SEQ ID NO: 387, SEQ ID NO: 388, SEQ ID NO: 389, SEQ ID NO: 390, SEQ ID NO: 391, SEQ ID NO: 392, SEQ ID NO: 393, SEQ ID NO: 394, SEQ ID NO: 395, SEQ ID NO: 396, SEQ ID NO: 397, SEQ ID NO: 398, SEQ ID NO: 399, SEQ ID NO: 400, SEQ ID NO: 401, SEQ ID NO: 402, SEQ ID NO: 403, SEQ ID NO: 404, SEQ ID NO: 405, SEQ ID NO: 406, SEQ ID NO: 407, SEQ ID NO: 408, SEQ ID NO: 409, SEQ ID NO: 410, SEQ ID NO: 411, SEQ ID NO: 412, SEQ ID NO: 413, SEQ ID NO: 414, SEQ ID NO: 415, SEQ ID NO: 416, SEQ ID NO: 417, SEQ ID NO: 418, SEQ ID NO: 419, SEQ ID NO: 420, SEQ ID NO: 421, SEQ ID NO: 422, SEQ ID NO: 423, SEQ ID NO: 424, or SEQ ID NO: 425.

[0526] In some examples of any of the ABPCs described herein, the first antigen-binding domain includes a light chain variable domain comprising SEQ ID NO: 461, and a heavy chain variable domain comprising: SEQ ID NO: 304, SEQ ID NO: 312, SEQ ID NO: 313, SEQ ID NO: 314, SEQ ID NO: 315, SEQ ID NO: 316, SEQ ID NO: 317, SEQ ID NO: 318, SEQ ID NO: 319, SEQ ID NO: 320, SEQ ID NO: 321, SEQ ID NO: 322, SEQ ID NO: 323, SEQ ID NO: 324, SEQ ID NO: 325, SEQ ID NO: 326, SEQ ID NO: 327, SEQ ID NO: 328, SEQ ID NO: 329, SEQ ID NO: 330, SEQ ID NO: 331, SEQ ID NO: 332, SEQ ID NO: 333, SEQ ID NO: 334, SEQ ID NO: 335, SEQ ID NO: 336, SEQ ID NO: 337, SEQ ID NO: 338, SEQ ID NO: 339, SEQ ID NO: 340, SEQ ID NO: 341, SEQ ID NO: 342, SEQ ID NO: 343, SEQ ID NO: 344, SEQ ID NO: 345, SEQ ID NO: 346, SEQ ID NO: 347, SEQ ID NO: 348, SEQ ID NO: 349, SEQ ID NO: 381, SEQ ID NO: 382, SEQ ID NO: 383, SEQ ID NO: 384, SEQ ID NO: 385, SEQ ID NO: 386, SEQ ID NO: 387, SEQ ID NO: 388, SEQ ID NO: 389, SEQ ID NO: 390, SEQ ID NO: 391, SEQ ID NO: 392, SEQ ID NO: 393, SEQ ID NO: 394, SEQ ID NO: 395, SEQ ID NO: 396, SEQ ID NO: 397, SEQ ID NO: 398, SEQ ID NO: 399, SEQ ID NO: 400, SEQ ID NO: 401, SEQ ID NO: 402, SEQ ID NO: 403, SEQ ID NO: 404, SEQ ID NO: 405, SEQ ID NO: 406, SEQ ID NO: 407, SEQ ID NO: 408, SEQ ID NO: 409, SEQ ID NO: 410, SEQ ID NO: 411, SEQ ID NO: 412, SEQ ID NO: 413, SEQ ID NO: 414, SEQ ID NO: 415, SEQ ID NO: 416, SEQ ID NO: 417, SEQ ID NO: 418, SEQ ID NO: 419, SEQ ID NO: 420, SEQ ID NO: 421, SEQ ID NO: 422, SEQ ID NO: 423, SEQ ID NO: 424, or SEQ ID NO: 425.

[0527] In some examples of any of the ABPCs described herein, the first antigen-binding domain includes a light chain variable domain comprising SEQ ID NO: 462, and a heavy chain variable domain comprising: SEQ ID NO: 304, SEQ ID NO: 312, SEQ ID NO: 313, SEQ ID NO: 314, SEQ ID NO: 315, SEQ ID NO: 316, SEQ ID NO: 317, SEQ ID NO: 318, SEQ ID NO: 319, SEQ ID NO: 320, SEQ ID NO: 321, SEQ ID NO: 322, SEQ ID NO: 323, SEQ ID NO: 324, SEQ ID NO: 325, SEQ ID NO: 326, SEQ ID NO: 327, SEQ ID NO: 328, SEQ ID NO: 329, SEQ ID NO: 330, SEQ ID NO: 331, SEQ ID NO: 332, SEQ ID NO: 333, SEQ ID NO: 334, SEQ ID NO: 335, SEQ ID NO: 336, SEQ ID NO: 337, SEQ ID NO: 338, SEQ ID NO: 339, SEQ ID NO: 340, SEQ ID NO: 341, SEQ ID NO: 342, SEQ ID NO: 343, SEQ ID NO: 344, SEQ ID NO: 345, SEQ ID NO: 346, SEQ ID NO: 347, SEQ ID NO: 348, SEQ ID NO: 349, SEQ ID NO: 381, SEQ ID NO: 382, SEQ ID NO: 383, SEQ ID NO: 384, SEQ ID NO: 385, SEQ ID NO: 386, SEQ ID NO: 387, SEQ ID NO: 388, SEQ ID NO: 389, SEQ ID NO: 390, SEQ ID NO: 391, SEQ ID NO: 392, SEQ ID NO: 393, SEQ ID NO: 394, SEQ ID NO: 395, SEQ ID NO: 396, SEQ ID NO: 397, SEQ ID NO: 398, SEQ ID NO: 399, SEQ ID NO: 400, SEQ ID NO: 401, SEQ ID NO: 402, SEQ ID NO: 403, SEQ ID NO: 404, SEQ ID NO: 405, SEQ ID NO: 406, SEQ ID NO: 407, SEQ ID NO: 408, SEQ ID NO: 409, SEQ ID NO: 410, SEQ ID NO: 411, SEQ ID NO: 412, SEQ ID NO: 413, SEQ ID NO: 414, SEQ ID NO: 415, SEQ ID NO: 416, SEQ ID NO: 417, SEQ ID NO: 418, SEQ ID NO: 419, SEQ ID NO: 420, SEQ ID NO: 421, SEQ ID NO: 422, SEQ ID NO: 423, SEQ ID NO: 424, or SEQ ID NO: 425.

[0528] In some examples of any of the ABPCs described herein, the first antigen-binding domain includes a light chain variable domain comprising SEQ ID NO: 463, and a heavy chain variable domain comprising: SEQ ID NO: 304, SEQ ID NO: 312, SEQ ID NO: 313, SEQ ID NO: 314, SEQ ID NO: 315, SEQ ID NO: 316, SEQ ID NO: 317, SEQ ID NO: 318, SEQ ID NO: 319, SEQ ID NO: 320, SEQ ID NO: 321, SEQ ID NO: 322, SEQ ID NO: 323, SEQ ID NO: 324, SEQ ID NO: 325, SEQ ID NO: 326, SEQ ID NO: 327, SEQ ID NO: 328, SEQ ID NO: 329, SEQ ID NO: 330, SEQ ID NO: 331, SEQ ID NO: 332, SEQ ID NO: 333, SEQ ID NO: 334, SEQ ID NO: 335, SEQ ID NO: 336, SEQ ID NO: 337, SEQ ID NO: 338, SEQ ID NO: 339, SEQ ID NO: 340, SEQ ID NO: 341, SEQ ID NO: 342, SEQ ID NO: 343, SEQ ID NO: 344, SEQ ID NO: 345, SEQ ID NO: 346, SEQ ID NO: 347, SEQ ID NO: 348, SEQ ID NO: 349, SEQ ID NO: 381, SEQ ID NO: 382, SEQ ID NO: 383, SEQ ID NO: 384, SEQ ID NO: 385, SEQ ID NO: 386, SEQ ID NO: 387, SEQ ID NO: 388, SEQ ID NO: 389, SEQ ID NO: 390, SEQ ID NO: 391, SEQ ID NO: 392, SEQ ID NO: 393, SEQ ID NO: 394, SEQ ID NO: 395, SEQ ID NO: 396, SEQ ID NO: 397, SEQ ID NO: 398, SEQ ID NO: 399, SEQ ID NO: 400, SEQ ID NO: 401, SEQ ID NO: 402, SEQ ID NO: 403, SEQ ID NO: 404, SEQ ID NO: 405, SEQ ID NO: 406, SEQ ID NO: 407, SEQ ID NO: 408, SEQ ID NO: 409, SEQ ID NO: 410, SEQ ID NO: 411, SEQ ID NO: 412, SEQ ID NO: 413, SEQ ID NO: 414, SEQ ID NO: 415, SEQ ID NO: 416, SEQ ID NO: 417, SEQ ID NO: 418, SEQ ID NO: 419, SEQ ID NO: 420, SEQ ID NO: 421, SEQ ID NO: 422, SEQ ID NO: 423, SEQ ID NO: 424, or SEQ ID NO: 425.

[0529] In some examples of any of the ABPCs described herein, the first antigen-binding domain includes a light chain variable domain comprising SEQ ID NO: 464, and a heavy chain variable domain comprising: SEQ ID NO: 304, SEQ ID NO: 312, SEQ ID NO: 313, SEQ ID NO: 314, SEQ ID NO: 315, SEQ ID NO: 316, SEQ ID NO: 317, SEQ ID NO: 318, SEQ ID NO: 319, SEQ ID NO: 320, SEQ ID NO: 321, SEQ ID NO: 322, SEQ ID NO: 323, SEQ ID NO: 324, SEQ ID NO: 325, SEQ ID NO: 326, SEQ ID NO: 327, SEQ ID NO: 328, SEQ ID NO: 329, SEQ ID NO: 330, SEQ ID NO: 331, SEQ ID NO: 332, SEQ ID NO: 333, SEQ ID NO: 334, SEQ ID NO: 335, SEQ ID NO: 336, SEQ ID NO: 337, SEQ ID NO: 338, SEQ ID NO: 339, SEQ ID NO: 340, SEQ ID NO: 341, SEQ ID NO: 342, SEQ ID NO: 343, SEQ ID NO: 344, SEQ ID NO: 345, SEQ ID NO: 346, SEQ ID NO: 347, SEQ ID NO: 348, SEQ ID NO: 349, SEQ ID NO: 381, SEQ ID NO: 382, SEQ ID NO: 383, SEQ ID NO: 384, SEQ ID NO: 385, SEQ ID NO: 386, SEQ ID NO: 387, SEQ ID NO: 388, SEQ ID NO: 389, SEQ ID NO: 390, SEQ ID NO: 391, SEQ ID NO: 392, SEQ ID NO: 393, SEQ ID NO: 394, SEQ ID NO: 395, SEQ ID NO: 396, SEQ ID NO: 397, SEQ ID NO: 398, SEQ ID NO: 399, SEQ ID NO: 400, SEQ ID NO: 401, SEQ ID NO: 402, SEQ ID NO: 403, SEQ ID NO: 404, SEQ ID NO: 405, SEQ ID NO: 406, SEQ ID NO: 407, SEQ ID NO: 408, SEQ ID NO: 409, SEQ ID NO: 410, SEQ ID NO: 411, SEQ ID NO: 412, SEQ ID NO: 413, SEQ ID NO: 414, SEQ ID NO: 415, SEQ ID NO: 416, SEQ ID NO: 417, SEQ ID NO: 418, SEQ ID NO: 419, SEQ ID NO: 420, SEQ ID NO: 421, SEQ ID NO: 422, SEQ ID NO: 423, SEQ ID NO: 424, or SEQ ID NO: 425.

[0530] In some examples of any of the ABPCs described herein, the first antigen-binding domain includes a light chain variable domain comprising SEQ ID NO: 465, and a heavy chain variable domain comprising: SEQ ID NO: 304, SEQ ID NO: 312, SEQ ID NO: 313, SEQ ID NO: 314, SEQ ID NO: 315, SEQ ID NO: 316, SEQ ID NO: 317, SEQ ID NO: 318, SEQ ID NO: 319, SEQ ID NO: 320, SEQ ID NO: 321, SEQ ID NO: 322, SEQ ID NO: 323, SEQ ID NO: 324, SEQ ID NO: 325, SEQ ID NO: 326, SEQ ID NO: 327, SEQ ID NO: 328, SEQ ID NO: 329, SEQ ID NO: 330, SEQ ID NO: 331, SEQ ID NO: 332, SEQ ID NO: 333, SEQ ID NO: 334, SEQ ID NO: 335, SEQ ID NO: 336, SEQ ID NO: 337, SEQ ID NO: 338, SEQ ID NO: 339, SEQ ID NO: 340, SEQ ID NO: 341, SEQ ID NO: 342, SEQ ID NO: 343, SEQ ID NO: 344, SEQ ID NO: 345, SEQ ID NO: 346, SEQ ID NO: 347, SEQ ID NO: 348, SEQ ID NO: 349, SEQ ID NO: 381, SEQ ID NO: 382, SEQ ID NO: 383, SEQ ID NO: 384, SEQ ID NO: 385, SEQ ID NO: 386, SEQ ID NO: 387, SEQ ID NO: 388, SEQ ID NO: 389, SEQ ID NO: 390, SEQ ID NO: 391, SEQ ID NO: 392, SEQ ID NO: 393, SEQ ID NO: 394, SEQ ID NO: 395, SEQ ID NO: 396, SEQ ID NO: 397, SEQ ID NO: 398, SEQ ID NO: 399, SEQ ID NO: 400, SEQ ID NO: 401, SEQ ID NO: 402, SEQ ID NO: 403, SEQ ID NO: 404, SEQ ID NO: 405, SEQ ID NO: 406, SEQ ID NO: 407, SEQ ID NO: 408, SEQ ID NO: 409, SEQ ID NO: 410, SEQ ID NO: 411, SEQ ID NO: 412, SEQ ID NO: 413, SEQ ID NO: 414, SEQ ID NO: 415, SEQ ID NO: 416, SEQ ID NO: 417, SEQ ID NO: 418, SEQ ID NO: 419, SEQ ID NO: 420, SEQ ID NO: 421, SEQ ID NO: 422, SEQ ID NO: 423, SEQ ID NO: 424, or SEQ ID NO: 425.

[0531] In some examples of any of the ABPCs described herein, the first antigen-binding domain includes a light chain variable domain comprising SEQ ID NO: 466, and a heavy chain variable domain comprising: SEQ ID NO: 304, SEQ ID NO: 312, SEQ ID NO: 313, SEQ ID NO: 314, SEQ ID NO: 315, SEQ ID NO: 316, SEQ ID NO: 317, SEQ ID NO: 318, SEQ ID NO: 319, SEQ ID NO: 320, SEQ ID NO: 321, SEQ ID NO: 322, SEQ ID NO: 323, SEQ ID NO: 324, SEQ ID NO: 325, SEQ ID NO: 326, SEQ ID NO: 327, SEQ ID NO: 328, SEQ ID NO: 329, SEQ ID NO: 330, SEQ ID NO: 331, SEQ ID NO: 332, SEQ ID NO: 333, SEQ ID NO: 334, SEQ ID NO: 335, SEQ ID NO: 336, SEQ ID NO: 337, SEQ ID NO: 338, SEQ ID NO: 339, SEQ ID NO: 340, SEQ ID NO: 341, SEQ ID NO: 342, SEQ ID NO: 343, SEQ ID NO: 344, SEQ ID NO: 345, SEQ ID NO: 346, SEQ ID NO: 347, SEQ ID NO: 348, SEQ ID NO: 349, SEQ ID NO: 381, SEQ ID NO: 382, SEQ ID NO: 383, SEQ ID NO: 384, SEQ ID NO: 385, SEQ ID NO: 386, SEQ ID NO: 387, SEQ ID NO: 388, SEQ ID NO: 389, SEQ ID NO: 390, SEQ ID NO: 391, SEQ ID NO: 392, SEQ ID NO: 393, SEQ ID NO: 394, SEQ ID NO: 395, SEQ ID NO: 396, SEQ ID NO: 397, SEQ ID NO: 398, SEQ ID NO: 399, SEQ ID NO: 400, SEQ ID NO: 401, SEQ ID NO: 402, SEQ ID NO: 403, SEQ ID NO: 404, SEQ ID NO: 405, SEQ ID NO: 406, SEQ ID NO: 407, SEQ ID NO: 408, SEQ ID NO: 409, SEQ ID NO: 410, SEQ ID NO: 411, SEQ ID NO: 412, SEQ ID NO: 413, SEQ ID NO: 414, SEQ ID NO: 415, SEQ ID NO: 416, SEQ ID NO: 417, SEQ ID NO: 418, SEQ ID NO: 419, SEQ ID NO: 420, SEQ ID NO: 421, SEQ ID NO: 422, SEQ ID NO: 423, SEQ ID NO: 424, or SEQ ID NO: 425.

[0532] In some examples of any of the ABPCs described herein, the first antigen-binding domain includes a light chain variable domain comprising SEQ ID NO: 467, and a heavy chain variable domain comprising: SEQ ID NO: 304, SEQ ID NO: 312, SEQ ID NO: 313, SEQ ID NO: 314, SEQ ID NO: 315, SEQ ID NO: 316, SEQ ID NO: 317, SEQ ID NO: 318, SEQ ID NO: 319, SEQ ID NO: 320, SEQ ID NO: 321, SEQ ID NO: 322, SEQ ID NO: 323, SEQ ID NO: 324, SEQ ID NO: 325, SEQ ID NO: 326, SEQ ID NO: 327, SEQ ID NO: 328, SEQ ID NO: 329, SEQ ID NO: 330, SEQ ID NO: 331, SEQ ID NO: 332, SEQ ID NO: 333, SEQ ID NO: 334, SEQ ID NO: 335, SEQ ID NO: 336, SEQ ID NO: 337, SEQ ID NO: 338, SEQ ID NO: 339, SEQ ID NO: 340, SEQ ID NO: 341, SEQ ID NO: 342, SEQ ID NO: 343, SEQ ID NO: 344, SEQ ID NO: 345, SEQ ID NO: 346, SEQ ID NO: 347, SEQ ID NO: 348, SEQ ID NO: 349, SEQ ID NO: 381, SEQ ID NO: 382, SEQ ID NO: 383, SEQ ID NO: 384, SEQ ID NO: 385, SEQ ID NO: 386, SEQ ID NO: 387, SEQ ID NO: 388, SEQ ID NO: 389, SEQ ID NO: 390, SEQ ID NO: 391, SEQ ID NO: 392, SEQ ID NO: 393, SEQ ID NO: 394, SEQ ID NO: 395, SEQ ID NO: 396, SEQ ID NO: 397, SEQ ID NO: 398, SEQ ID NO: 399, SEQ ID NO: 400, SEQ ID NO: 401, SEQ ID NO: 402, SEQ ID NO: 403, SEQ ID NO: 404, SEQ ID NO: 405, SEQ ID NO: 406, SEQ ID NO: 407, SEQ ID NO: 408, SEQ ID NO: 409, SEQ ID NO: 410, SEQ ID NO: 411, SEQ ID NO: 412, SEQ ID NO: 413, SEQ ID NO: 414, SEQ ID NO: 415, SEQ ID NO: 416, SEQ ID NO: 417, SEQ ID NO: 418, SEQ ID NO: 419, SEQ ID NO: 420, SEQ ID NO: 421, SEQ ID NO: 422, SEQ ID NO: 423, SEQ ID NO: 424, or SEQ ID NO: 425.

[0533] In some examples of any of the ABPCs described herein, the first antigen-binding domain includes a light chain variable domain comprising SEQ ID NO: 468 and a heavy chain variable domain comprising: SEQ ID NO: 304, SEQ ID NO: 312, SEQ ID NO: 313, SEQ ID NO: 314, SEQ ID NO: 315, SEQ ID NO: 316, SEQ ID NO: 317, SEQ ID NO: 318, SEQ ID NO: 319, SEQ ID NO: 320, SEQ ID NO: 321, SEQ ID NO: 322, SEQ ID NO: 323, SEQ ID NO: 324, SEQ ID NO: 325, SEQ ID NO: 326, SEQ ID NO: 327, SEQ ID NO: 328, SEQ ID NO: 329, SEQ ID NO: 330, SEQ ID NO: 331, SEQ ID NO: 332, SEQ ID NO: 333, SEQ ID NO: 334, SEQ ID NO: 335, SEQ ID NO: 336, SEQ ID NO: 337, SEQ ID NO: 338, SEQ ID NO: 339, SEQ ID NO: 340, SEQ ID NO: 341, SEQ ID NO: 342, SEQ ID NO: 343, SEQ ID NO: 344, SEQ ID NO: 345, SEQ ID NO: 346, SEQ ID NO: 347, SEQ ID NO: 348, SEQ ID NO: 349, SEQ ID NO: 381, SEQ ID NO: 382, SEQ ID NO: 383, SEQ ID NO: 384, SEQ ID NO: 385, SEQ ID NO: 386, SEQ ID NO: 387, SEQ ID NO: 388, SEQ ID NO: 389, SEQ ID NO: 390, SEQ ID NO: 391, SEQ ID NO: 392, SEQ ID NO: 393, SEQ ID NO: 394, SEQ ID NO: 395, SEQ ID NO: 396, SEQ ID NO: 397, SEQ ID NO: 398, SEQ ID NO: 399, SEQ ID NO: 400, SEQ ID NO: 401, SEQ ID NO: 402, SEQ ID NO: 403, SEQ ID NO: 404, SEQ ID NO: 405, SEQ ID NO: 406, SEQ ID NO: 407, SEQ ID NO: 408, SEQ ID NO: 409, SEQ ID NO: 410, SEQ ID NO: 411, SEQ ID NO: 412, SEQ ID NO: 413, SEQ ID NO: 414, SEQ ID NO: 415, SEQ ID NO: 416, SEQ ID NO: 417, SEQ ID NO: 418, SEQ ID NO: 419, SEQ ID NO: 420, SEQ ID NO: 421, SEQ ID NO: 422, SEQ ID NO: 423, SEQ ID NO: 424, or SEQ ID NO: 425.

[0534] In some examples of any of the ABPCs described herein, the first antigen-binding domain includes a light chain variable domain comprising SEQ ID NO: 469, and a heavy chain variable domain comprising: SEQ ID NO: 304, SEQ ID NO: 312, SEQ ID NO: 313, SEQ ID NO: 314, SEQ ID NO: 315, SEQ ID NO: 316, SEQ ID NO: 317, SEQ ID NO: 318, SEQ ID NO: 319, SEQ ID NO: 320, SEQ ID NO: 321, SEQ ID NO: 322, SEQ ID NO: 323, SEQ ID NO: 324, SEQ ID NO: 325, SEQ ID NO: 326, SEQ ID NO: 327, SEQ ID NO: 328, SEQ ID NO: 329, SEQ ID NO: 330, SEQ ID NO: 331, SEQ ID NO: 332, SEQ ID NO: 333, SEQ ID NO: 334, SEQ ID NO: 335, SEQ ID NO: 336, SEQ ID NO: 337, SEQ ID NO: 338, SEQ ID NO: 339, SEQ ID NO: 340, SEQ ID NO: 341, SEQ ID NO: 342, SEQ ID NO: 343, SEQ ID NO: 344, SEQ ID NO: 345, SEQ ID NO: 346, SEQ ID NO: 347, SEQ ID NO: 348, SEQ ID NO: 349, SEQ ID NO: 381, SEQ ID NO: 382, SEQ ID NO: 383, SEQ ID NO: 384, SEQ ID NO: 385, SEQ ID NO: 386, SEQ ID NO: 387, SEQ ID NO: 388, SEQ ID NO: 389, SEQ ID NO: 390, SEQ ID NO: 391, SEQ ID NO: 392, SEQ ID NO: 393, SEQ ID NO: 394, SEQ ID NO: 395, SEQ ID NO: 396, SEQ ID NO: 397, SEQ ID NO: 398, SEQ ID NO: 399, SEQ ID NO: 400, SEQ ID NO: 401, SEQ ID NO: 402, SEQ ID NO: 403, SEQ ID NO: 404, SEQ ID NO: 405, SEQ ID NO: 406, SEQ ID NO: 407, SEQ ID NO: 408, SEQ ID NO: 409, SEQ ID NO: 410, SEQ ID NO: 411, SEQ ID NO: 412, SEQ ID NO: 413, SEQ ID NO: 414, SEQ ID NO: 415, SEQ ID NO: 416, SEQ ID NO: 417, SEQ ID NO: 418, SEQ ID NO: 419, SEQ ID NO: 420, SEQ ID NO: 421, SEQ ID NO: 422, SEQ ID NO: 423, SEQ ID NO: 424, or SEQ ID NO: 425.

[0535] In some examples of any of the ABPCs described herein, the first antigen-binding domain includes a light chain variable domain comprising SEQ ID NO: 470, and a heavy chain variable domain comprising: SEQ ID NO: 304, SEQ ID NO: 312, SEQ ID NO: 313, SEQ ID NO: 314, SEQ ID NO: 315, SEQ ID NO: 316, SEQ ID NO: 317, SEQ ID NO: 318, SEQ ID NO: 319, SEQ ID NO: 320, SEQ ID NO: 321, SEQ ID NO: 322, SEQ ID NO: 323, SEQ ID NO: 324, SEQ ID NO: 325, SEQ ID NO: 326, SEQ ID NO: 327, SEQ ID NO: 328, SEQ ID NO: 329, SEQ ID NO: 330, SEQ ID NO: 331, SEQ ID NO: 332, SEQ ID NO: 333, SEQ ID NO: 334, SEQ ID NO: 335, SEQ ID NO: 336, SEQ ID NO: 337, SEQ ID NO: 338, SEQ ID NO: 339, SEQ ID NO: 340, SEQ ID NO: 341, SEQ ID NO: 342, SEQ ID NO: 343, SEQ ID NO: 344, SEQ ID NO: 345, SEQ ID NO: 346, SEQ ID NO: 347, SEQ ID NO: 348, SEQ ID NO: 349, SEQ ID NO: 381, SEQ ID NO: 382, SEQ ID NO: 383, SEQ ID NO: 384, SEQ ID NO: 385, SEQ ID NO: 386, SEQ ID NO: 387, SEQ ID NO: 388, SEQ ID NO: 389, SEQ ID NO: 390, SEQ ID NO: 391, SEQ ID NO: 392, SEQ ID NO: 393, SEQ ID NO: 394, SEQ ID NO: 395, SEQ ID NO: 396, SEQ ID NO: 397, SEQ ID NO: 398, SEQ ID NO: 399, SEQ ID NO: 400, SEQ ID NO: 401, SEQ ID NO: 402, SEQ ID NO: 403, SEQ ID NO: 404, SEQ ID NO: 405, SEQ ID NO: 406, SEQ ID NO: 407, SEQ ID NO: 408, SEQ ID NO: 409, SEQ ID NO: 410, SEQ ID NO: 411, SEQ ID NO: 412, SEQ ID NO: 413, SEQ ID NO: 414, SEQ ID NO: 415, SEQ ID NO: 416, SEQ ID NO: 417, SEQ ID NO: 418, SEQ ID NO: 419, SEQ ID NO: 420, SEQ ID NO: 421, SEQ ID NO: 422, SEQ ID NO: 423, SEQ ID NO: 424, or SEQ ID NO: 425.

[0536] In some examples of any of the ABPCs described herein, the first antigen-binding domain includes a light chain variable domain comprising SEQ ID NO: 471, and a heavy chain variable domain comprising: SEQ ID NO: 304, SEQ ID NO: 312, SEQ ID NO: 313, SEQ ID NO: 314, SEQ ID NO: 315, SEQ ID NO: 316, SEQ ID NO: 317, SEQ ID NO: 318, SEQ ID NO: 319, SEQ ID NO: 320, SEQ ID NO: 321, SEQ ID NO: 322, SEQ ID NO: 323, SEQ ID NO: 324, SEQ ID NO: 325, SEQ ID NO: 326, SEQ ID NO: 327, SEQ ID NO: 328, SEQ ID NO: 329, SEQ ID NO: 330, SEQ ID NO: 331, SEQ ID NO: 332, SEQ ID NO: 333, SEQ ID NO: 334, SEQ ID NO: 335, SEQ ID NO: 336, SEQ ID NO: 337, SEQ ID NO: 338, SEQ ID NO: 339, SEQ ID NO: 340, SEQ ID NO: 341, SEQ ID NO: 342, SEQ ID NO: 343, SEQ ID NO: 344, SEQ ID NO: 345, SEQ ID NO: 346, SEQ ID NO: 347, SEQ ID NO: 348, SEQ ID NO: 349, SEQ ID NO: 381, SEQ ID NO: 382, SEQ ID NO: 383, SEQ ID NO: 384, SEQ ID NO: 385, SEQ ID NO: 386, SEQ ID NO: 387, SEQ ID NO: 388, SEQ ID NO: 389, SEQ ID NO: 390, SEQ ID NO: 391, SEQ ID NO: 392, SEQ ID NO: 393, SEQ ID NO: 394, SEQ ID NO: 395, SEQ ID NO: 396, SEQ ID NO: 397, SEQ ID NO: 398, SEQ ID NO: 399, SEQ ID NO: 400, SEQ ID NO: 401, SEQ ID NO: 402, SEQ ID NO: 403, SEQ ID NO: 404, SEQ ID NO: 405, SEQ ID NO: 406, SEQ ID NO: 407, SEQ ID NO: 408, SEQ ID NO: 409, SEQ ID NO: 410, SEQ ID NO: 411, SEQ ID NO: 412, SEQ ID NO: 413, SEQ ID NO: 414, SEQ ID NO: 415, SEQ ID NO: 416, SEQ ID NO: 417, SEQ ID NO: 418, SEQ ID NO: 419, SEQ ID NO: 420, SEQ ID NO: 421, SEQ ID NO: 422, SEQ ID NO: 423, SEQ ID NO: 424, or SEQ ID NO: 425.

[0537] In some examples of any of the ABPCs described herein, the first antigen-binding domain includes a light chain variable domain comprising SEQ ID NO: 472, and a heavy chain variable domain comprising: SEQ ID NO: 304, SEQ ID NO: 312, SEQ ID NO: 313, SEQ ID NO: 314, SEQ ID NO: 315, SEQ ID NO: 316, SEQ ID NO: 317, SEQ ID NO: 318, SEQ ID NO: 319, SEQ ID NO: 320, SEQ ID NO: 321, SEQ ID NO: 322, SEQ ID NO: 323, SEQ ID NO: 324, SEQ ID NO: 325, SEQ ID NO: 326, SEQ ID NO: 327, SEQ ID NO: 328, SEQ ID NO: 329, SEQ ID NO: 330, SEQ ID NO: 331, SEQ ID NO: 332, SEQ ID NO: 333, SEQ ID NO: 334, SEQ ID NO: 335, SEQ ID NO: 336, SEQ ID NO: 337, SEQ ID NO: 338, SEQ ID NO: 339, SEQ ID NO: 340, SEQ ID NO: 341, SEQ ID NO: 342, SEQ ID NO: 343, SEQ ID NO: 344, SEQ ID NO: 345, SEQ ID NO: 346, SEQ ID NO: 347, SEQ ID NO: 348, SEQ ID NO: 349, SEQ ID NO: 381, SEQ ID NO: 382, SEQ ID NO: 383, SEQ ID NO: 384, SEQ ID NO: 385, SEQ ID NO: 386, SEQ ID NO: 387, SEQ ID NO: 388, SEQ ID NO: 389, SEQ ID NO: 390, SEQ ID NO: 391, SEQ ID NO: 392, SEQ ID NO: 393, SEQ ID NO: 394, SEQ ID NO: 395, SEQ ID NO: 396, SEQ ID NO: 397, SEQ ID NO: 398, SEQ ID NO: 399, SEQ ID NO: 400, SEQ ID NO: 401, SEQ ID NO: 402, SEQ ID NO: 403, SEQ ID NO: 404, SEQ ID NO: 405, SEQ ID NO: 406, SEQ ID NO: 407, SEQ ID NO: 408, SEQ ID NO: 409, SEQ ID NO: 410, SEQ ID NO: 411, SEQ ID NO: 412, SEQ ID NO: 413, SEQ ID NO: 414, SEQ ID NO: 415, SEQ ID NO: 416, SEQ ID NO: 417, SEQ ID NO: 418, SEQ ID NO: 419, SEQ ID NO: 420, SEQ ID NO: 421, SEQ ID NO: 422, SEQ ID NO: 423, SEQ ID NO: 424, or SEQ ID NO: 425.

[0538] In some examples of any of the ABPCs described herein, the first antigen-binding domain includes a light chain variable domain comprising SEQ ID NO: 473, and a heavy chain variable domain comprising: SEQ ID NO: 304, SEQ ID NO: 312, SEQ ID NO: 313, SEQ ID NO: 314, SEQ ID NO: 315, SEQ ID NO: 316, SEQ ID NO: 317, SEQ ID NO: 318, SEQ ID NO: 319, SEQ ID NO: 320, SEQ ID NO: 321, SEQ ID NO: 322, SEQ ID NO: 323, SEQ ID NO: 324, SEQ ID NO: 325, SEQ ID NO: 326, SEQ ID NO: 327, SEQ ID NO: 328, SEQ ID NO: 329, SEQ ID NO: 330, SEQ ID NO: 331, SEQ ID NO: 332, SEQ ID NO: 333, SEQ ID NO: 334, SEQ ID NO: 335, SEQ ID NO: 336, SEQ ID NO: 337, SEQ ID NO: 338, SEQ ID NO: 339, SEQ ID NO: 340, SEQ ID NO: 341, SEQ ID NO: 342, SEQ ID NO: 343, SEQ ID NO: 344, SEQ ID NO: 345, SEQ ID NO: 346, SEQ ID NO: 347, SEQ ID NO: 348, SEQ ID NO: 349, SEQ ID NO: 381, SEQ ID NO: 382, SEQ ID NO: 383, SEQ ID NO: 384, SEQ ID NO: 385, SEQ ID NO: 386, SEQ ID NO: 387, SEQ ID NO: 388, SEQ ID NO: 389, SEQ ID NO: 390, SEQ ID NO: 391, SEQ ID NO: 392, SEQ ID NO: 393, SEQ ID NO: 394, SEQ ID NO: 395, SEQ ID NO: 396, SEQ ID NO: 397, SEQ ID NO: 398, SEQ ID NO: 399, SEQ ID NO: 400, SEQ ID NO: 401, SEQ ID NO: 402, SEQ ID NO: 403, SEQ ID NO: 404, SEQ ID NO: 405, SEQ ID NO: 406, SEQ ID NO: 407, SEQ ID NO: 408, SEQ ID NO: 409, SEQ ID NO: 410, SEQ ID NO: 411, SEQ ID NO: 412, SEQ ID NO: 413, SEQ ID NO: 414, SEQ ID NO: 415, SEQ ID NO: 416, SEQ ID NO: 417, SEQ ID NO: 418, SEQ ID NO: 419, SEQ ID NO: 420, SEQ ID NO: 421, SEQ ID NO: 422, SEQ ID NO: 423, SEQ ID NO: 424, or SEQ ID NO: 425.

[0539] In some examples of any of the ABPCs described herein, the first antigen-binding domain includes a light chain variable domain comprising SEQ ID NO: 474, and a heavy chain variable domain comprising: SEQ ID NO: 304, SEQ ID NO: 312, SEQ ID NO: 313, SEQ ID NO: 314, SEQ ID NO: 315, SEQ ID NO: 316, SEQ ID NO: 317, SEQ ID NO: 318, SEQ ID NO: 319, SEQ ID NO: 320, SEQ ID NO: 321, SEQ ID NO: 322, SEQ ID NO: 323, SEQ ID NO: 324, SEQ ID NO: 325, SEQ ID NO: 326, SEQ ID NO: 327, SEQ ID NO: 328, SEQ ID NO: 329, SEQ ID NO: 330, SEQ ID NO: 331, SEQ ID NO: 332, SEQ ID NO: 333, SEQ ID NO: 334, SEQ ID NO: 335, SEQ ID NO: 336, SEQ ID NO: 337, SEQ ID NO: 338, SEQ ID NO: 339, SEQ ID NO: 340, SEQ ID NO: 341, SEQ ID NO: 342, SEQ ID NO: 343, SEQ ID NO: 344, SEQ ID NO: 345, SEQ ID NO: 346, SEQ ID NO: 347, SEQ ID NO: 348, SEQ ID NO: 349, SEQ ID NO: 381, SEQ ID NO: 382, SEQ ID NO: 383, SEQ ID NO: 384, SEQ ID NO: 385, SEQ ID NO: 386, SEQ ID NO: 387, SEQ ID NO: 388, SEQ ID NO: 389, SEQ ID NO: 390, SEQ ID NO: 391, SEQ ID NO: 392, SEQ ID NO: 393, SEQ ID NO: 394, SEQ ID NO: 395, SEQ ID NO: 396, SEQ ID NO: 397, SEQ ID NO: 398, SEQ ID NO: 399, SEQ ID NO: 400, SEQ ID NO: 401, SEQ ID NO: 402, SEQ ID NO: 403, SEQ ID NO: 404, SEQ ID NO: 405, SEQ ID NO: 406, SEQ ID NO: 407, SEQ ID NO: 408, SEQ ID NO: 409, SEQ ID NO: 410, SEQ ID NO: 411, SEQ ID NO: 412, SEQ ID NO: 413, SEQ ID NO: 414, SEQ ID NO: 415, SEQ ID NO: 416, SEQ ID NO: 417, SEQ ID NO: 418, SEQ ID NO: 419, SEQ ID NO: 420, SEQ ID NO: 421, SEQ ID NO: 422, SEQ ID NO: 423, SEQ ID NO: 424, or SEQ ID NO: 425.

[0540] In some examples of any of the ABPCs described herein, the first antigen-binding domain includes a light chain variable domain comprising SEQ ID NO: 475, and a heavy chain variable domain comprising: SEQ ID NO: 304, SEQ ID NO: 312, SEQ ID NO: 313, SEQ ID NO: 314, SEQ ID NO: 315, SEQ ID NO: 316, SEQ ID NO: 317, SEQ ID NO: 318, SEQ ID NO: 319, SEQ ID NO: 320, SEQ ID NO: 321, SEQ ID NO: 322, SEQ ID NO: 323, SEQ ID NO: 324, SEQ ID NO: 325, SEQ ID NO: 326, SEQ ID NO: 327, SEQ ID NO: 328, SEQ ID NO: 329, SEQ ID NO: 330, SEQ ID NO: 331, SEQ ID NO: 332, SEQ ID NO: 333, SEQ ID NO: 334, SEQ ID NO: 335, SEQ ID NO: 336, SEQ ID NO: 337, SEQ ID NO: 338, SEQ ID NO: 339, SEQ ID NO: 340, SEQ ID NO: 341, SEQ ID NO: 342, SEQ ID NO: 343, SEQ ID NO: 344, SEQ ID NO: 345, SEQ ID NO: 346, SEQ ID NO: 347, SEQ ID NO: 348, SEQ ID NO: 349, SEQ ID NO: 381, SEQ ID NO: 382, SEQ ID NO: 383, SEQ ID NO: 384, SEQ ID NO: 385, SEQ ID NO: 386, SEQ ID NO: 387, SEQ ID NO: 388, SEQ ID NO: 389, SEQ ID NO: 390, SEQ ID NO: 391, SEQ ID NO: 392, SEQ ID NO: 393, SEQ ID NO: 394, SEQ ID NO: 395, SEQ ID NO: 396, SEQ ID NO: 397, SEQ ID NO: 398, SEQ ID NO: 399, SEQ ID NO: 400, SEQ ID NO: 401, SEQ ID NO: 402, SEQ ID NO: 403, SEQ ID NO: 404, SEQ ID NO: 405, SEQ ID NO: 406, SEQ ID NO: 407, SEQ ID NO: 408, SEQ ID NO: 409, SEQ ID NO: 410, SEQ ID NO: 411, SEQ ID NO: 412, SEQ ID NO: 413, SEQ ID NO: 414, SEQ ID NO: 415, SEQ ID NO: 416, SEQ ID NO: 417, SEQ ID NO: 418, SEQ ID NO: 419, SEQ ID NO: 420, SEQ ID NO: 421, SEQ ID NO: 422, SEQ ID NO: 423, SEQ ID NO: 424, or SEQ ID NO: 425.

[0541] In some examples of any of the ABPCs described herein, the first antigen-binding domain includes a light chain variable domain comprising SEQ ID NO: 476, and a heavy chain variable domain comprising: SEQ ID NO: 304, SEQ ID NO: 312, SEQ ID NO: 313, SEQ ID NO: 314, SEQ ID NO: 315, SEQ ID NO: 316, SEQ ID NO: 317, SEQ ID NO: 318, SEQ ID NO: 319, SEQ ID NO: 320, SEQ ID NO: 321, SEQ ID NO: 322, SEQ ID NO: 323, SEQ ID NO: 324, SEQ ID NO: 325, SEQ ID NO: 326, SEQ ID NO: 327, SEQ ID NO: 328, SEQ ID NO: 329, SEQ ID NO: 330, SEQ ID NO: 331, SEQ ID NO: 332, SEQ ID NO: 333, SEQ ID NO: 334, SEQ ID NO: 335, SEQ ID NO: 336, SEQ ID NO: 337, SEQ ID NO: 338, SEQ ID NO: 339, SEQ ID NO: 340, SEQ ID NO: 341, SEQ ID NO: 342, SEQ ID NO: 343, SEQ ID NO: 344, SEQ ID NO: 345, SEQ ID NO: 346, SEQ ID NO: 347, SEQ ID NO: 348, SEQ ID NO: 349, SEQ ID NO: 381, SEQ ID NO: 382, SEQ ID NO: 383, SEQ ID NO: 384, SEQ ID NO: 385, SEQ ID NO: 386, SEQ ID NO: 387, SEQ ID NO: 388, SEQ ID NO: 389, SEQ ID NO: 390, SEQ ID NO: 391, SEQ ID NO: 392, SEQ ID NO: 393, SEQ ID NO: 394, SEQ ID NO: 395, SEQ ID NO: 396, SEQ ID NO: 397, SEQ ID NO: 398, SEQ ID NO: 399, SEQ ID NO: 400, SEQ ID NO: 401, SEQ ID NO: 402, SEQ ID NO: 403, SEQ ID NO: 404, SEQ ID NO: 405, SEQ ID NO: 406, SEQ ID NO: 407, SEQ ID NO: 408, SEQ ID NO: 409, SEQ ID NO: 410, SEQ ID NO: 411, SEQ ID NO: 412, SEQ ID NO: 413, SEQ ID NO: 414, SEQ ID NO: 415, SEQ ID NO: 416, SEQ ID NO: 417, SEQ ID NO: 418, SEQ ID NO: 419, SEQ ID NO: 420, SEQ ID NO: 421, SEQ ID NO: 422, SEQ ID NO: 423, SEQ ID NO: 424, or SEQ ID NO: 425.

[0542] In some examples of any of the ABPCs described herein, the first antigen-binding domain includes a light chain variable domain comprising SEQ ID NO: 477, and a heavy chain variable domain comprising: SEQ ID NO: 304, SEQ ID NO: 312, SEQ ID NO: 313, SEQ ID NO: 314, SEQ ID NO: 315, SEQ ID NO: 316, SEQ ID NO: 317, SEQ ID NO: 318, SEQ ID NO: 319, SEQ ID NO: 320, SEQ ID NO: 321, SEQ ID NO: 322, SEQ ID NO: 323, SEQ ID NO: 324, SEQ ID NO: 325, SEQ ID NO: 326, SEQ ID NO: 327, SEQ ID NO: 328, SEQ ID NO: 329, SEQ ID NO: 330, SEQ ID NO: 331, SEQ ID NO: 332, SEQ ID NO: 333, SEQ ID NO: 334, SEQ ID NO: 335, SEQ ID NO: 336, SEQ ID NO: 337, SEQ ID NO: 338, SEQ ID NO: 339, SEQ ID NO: 340, SEQ ID NO: 341, SEQ ID NO: 342, SEQ ID NO: 343, SEQ ID NO: 344, SEQ ID NO: 345, SEQ ID NO: 346, SEQ ID NO: 347, SEQ ID NO: 348, SEQ ID NO: 349, SEQ ID NO: 381, SEQ ID NO: 382, SEQ ID NO: 383, SEQ ID NO: 384, SEQ ID NO: 385, SEQ ID NO: 386, SEQ ID NO: 387, SEQ ID NO: 388, SEQ ID NO: 389, SEQ ID NO: 390, SEQ ID NO: 391, SEQ ID NO: 392, SEQ ID NO: 393, SEQ ID NO: 394, SEQ ID NO: 395, SEQ ID NO: 396, SEQ ID NO: 397, SEQ ID NO: 398, SEQ ID NO: 399, SEQ ID NO: 400, SEQ ID NO: 401, SEQ ID NO: 402, SEQ ID NO: 403, SEQ ID NO: 404, SEQ ID NO: 405, SEQ ID NO: 406, SEQ ID NO: 407, SEQ ID NO: 408, SEQ ID NO: 409, SEQ ID NO: 410, SEQ ID NO: 411, SEQ ID NO: 412, SEQ ID NO: 413, SEQ ID NO: 414, SEQ ID NO: 415, SEQ ID NO: 416, SEQ ID NO: 417, SEQ ID NO: 418, SEQ ID NO: 419, SEQ ID NO: 420, SEQ ID NO: 421, SEQ ID NO: 422, SEQ ID NO: 423, SEQ ID NO: 424, or SEQ ID NO: 425.

[0543] In some examples of any of the ABPCs described herein, the first antigen-binding domain includes a light chain variable domain comprising SEQ ID NO: 478, and a heavy chain variable domain comprising: SEQ ID NO: 304, SEQ ID NO: 312, SEQ ID NO: 313, SEQ ID NO: 314, SEQ ID NO: 315, SEQ ID NO: 316, SEQ ID NO: 317, SEQ ID NO: 318, SEQ ID NO: 319, SEQ ID NO: 320, SEQ ID NO: 321, SEQ ID NO: 322, SEQ ID NO: 323, SEQ ID NO: 324, SEQ ID NO: 325, SEQ ID NO: 326, SEQ ID NO: 327, SEQ ID NO: 328, SEQ ID NO: 329, SEQ ID NO: 330, SEQ ID NO: 331, SEQ ID NO: 332, SEQ ID NO: 333, SEQ ID NO: 334, SEQ ID NO: 335, SEQ ID NO: 336, SEQ ID NO: 337, SEQ ID NO: 338, SEQ ID NO: 339, SEQ ID NO: 340, SEQ ID NO: 341, SEQ ID NO: 342, SEQ ID NO: 343, SEQ ID NO: 344, SEQ ID NO: 345, SEQ ID NO: 346, SEQ ID NO: 347, SEQ ID NO: 348, SEQ ID NO: 349, SEQ ID NO: 381, SEQ ID NO: 382, SEQ ID NO: 383, SEQ ID NO: 384, SEQ ID NO: 385, SEQ ID NO: 386, SEQ ID NO: 387, SEQ ID NO: 388, SEQ ID NO: 389, SEQ ID NO: 390, SEQ ID NO: 391, SEQ ID NO: 392, SEQ ID NO: 393, SEQ ID NO: 394, SEQ ID NO: 395, SEQ ID NO: 396, SEQ ID NO: 397, SEQ ID NO: 398, SEQ ID NO: 399, SEQ ID NO: 400, SEQ ID NO: 401, SEQ ID NO: 402, SEQ ID NO: 403, SEQ ID NO: 404, SEQ ID NO: 405, SEQ ID NO: 406, SEQ ID NO: 407, SEQ ID NO: 408, SEQ ID NO: 409, SEQ ID NO: 410, SEQ ID NO: 411, SEQ ID NO: 412, SEQ ID NO: 413, SEQ ID NO: 414, SEQ ID NO: 415, SEQ ID NO: 416, SEQ ID NO: 417, SEQ ID NO: 418, SEQ ID NO: 419, SEQ ID NO: 420, SEQ ID NO: 421, SEQ ID NO: 422, SEQ ID NO: 423, SEQ ID NO: 424, or SEQ ID NO: 425.

[0544] In some examples of any of the ABPCs described herein, the first antigen-binding domain includes a light chain variable domain comprising SEQ ID NO: 479, and a heavy chain variable domain comprising: SEQ ID NO: 304, SEQ ID NO: 312, SEQ ID NO: 313, SEQ ID NO: 314, SEQ ID NO: 315, SEQ ID NO: 316, SEQ ID NO: 317, SEQ ID NO: 318, SEQ ID NO: 319, SEQ ID NO: 320, SEQ ID NO: 321, SEQ ID NO: 322, SEQ ID NO: 323, SEQ ID NO: 324, SEQ ID NO: 325, SEQ ID NO: 326, SEQ ID NO: 327, SEQ ID NO: 328, SEQ ID NO: 329, SEQ ID NO: 330, SEQ ID NO: 331, SEQ ID NO: 332, SEQ ID NO: 333, SEQ ID NO: 334, SEQ ID NO: 335, SEQ ID NO: 336, SEQ ID NO: 337, SEQ ID NO: 338, SEQ ID NO: 339, SEQ ID NO: 340, SEQ ID NO: 341, SEQ ID NO: 342, SEQ ID NO: 343, SEQ ID NO: 344, SEQ ID NO: 345, SEQ ID NO: 346, SEQ ID NO: 347, SEQ ID NO: 348, SEQ ID NO: 349, SEQ ID NO: 381, SEQ ID NO: 382, SEQ ID NO: 383, SEQ ID NO: 384, SEQ ID NO: 385, SEQ ID NO: 386, SEQ ID NO: 387, SEQ ID NO: 388, SEQ ID NO: 389, SEQ ID NO: 390, SEQ ID NO: 391, SEQ ID NO: 392, SEQ ID NO: 393, SEQ ID NO: 394, SEQ ID NO: 395, SEQ ID NO: 396, SEQ ID NO: 397, SEQ ID NO: 398, SEQ ID NO: 399, SEQ ID NO: 400, SEQ ID NO: 401, SEQ ID NO: 402, SEQ ID NO: 403, SEQ ID NO: 404, SEQ ID NO: 405, SEQ ID NO: 406, SEQ ID NO: 407, SEQ ID NO: 408, SEQ ID NO: 409, SEQ ID NO: 410, SEQ ID NO: 411, SEQ ID NO: 412, SEQ ID NO: 413, SEQ ID NO: 414, SEQ ID NO: 415, SEQ ID NO: 416, SEQ ID NO: 417, SEQ ID NO: 418, SEQ ID NO: 419, SEQ ID NO: 420, SEQ ID NO: 421, SEQ ID NO: 422, SEQ ID NO: 423, SEQ ID NO: 424, or SEQ ID NO: 425.

[0545] In some examples of any of the ABPCs described herein, the first antigen-binding domain includes a light chain variable domain comprising SEQ ID NO: 480, and a heavy chain variable domain comprising: SEQ ID NO: 304, SEQ ID NO: 312, SEQ ID NO: 313, SEQ ID NO: 314, SEQ ID NO: 315, SEQ ID NO: 316, SEQ ID NO: 317, SEQ ID NO: 318, SEQ ID NO: 319, SEQ ID NO: 320, SEQ ID NO: 321, SEQ ID NO: 322, SEQ ID NO: 323, SEQ ID NO: 324, SEQ ID NO: 325, SEQ ID NO: 326, SEQ ID NO: 327, SEQ ID NO: 328, SEQ ID NO: 329, SEQ ID NO: 330, SEQ ID NO: 331, SEQ ID NO: 332, SEQ ID NO: 333, SEQ ID NO: 334, SEQ ID NO: 335, SEQ ID NO: 336, SEQ ID NO: 337, SEQ ID NO: 338, SEQ ID NO: 339, SEQ ID NO: 340, SEQ ID NO: 341, SEQ ID NO: 342, SEQ ID NO: 343, SEQ ID NO: 344, SEQ ID NO: 345, SEQ ID NO: 346, SEQ ID NO: 347, SEQ ID NO: 348, SEQ ID NO: 349, SEQ ID NO: 381, SEQ ID NO: 382, SEQ ID NO: 383, SEQ ID NO: 384, SEQ ID NO: 385, SEQ ID NO: 386, SEQ ID NO: 387, SEQ ID NO: 388, SEQ ID NO: 389, SEQ ID NO: 390, SEQ ID NO: 391, SEQ ID NO: 392, SEQ ID NO: 393, SEQ ID NO: 394, SEQ ID NO: 395, SEQ ID NO: 396, SEQ ID NO: 397, SEQ ID NO: 398, SEQ ID NO: 399, SEQ ID NO: 400, SEQ ID NO: 401, SEQ ID NO: 402, SEQ ID NO: 403, SEQ ID NO: 404, SEQ ID NO: 405, SEQ ID NO: 406, SEQ ID NO: 407, SEQ ID NO: 408, SEQ ID NO: 409, SEQ ID NO: 410, SEQ ID NO: 411, SEQ ID NO: 412, SEQ ID NO: 413, SEQ ID NO: 414, SEQ ID NO: 415, SEQ ID NO: 416, SEQ ID NO: 417, SEQ ID NO: 418, SEQ ID NO: 419, SEQ ID NO: 420, SEQ ID NO: 421, SEQ ID NO: 422, SEQ ID NO: 423, SEQ ID NO: 424, or SEQ ID NO: 425.

[0546] In some examples of any of the ABPCs described herein, the first antigen-binding domain includes a light chain variable domain comprising SEQ ID NO: 481, and a heavy chain variable domain comprising: SEQ ID NO: 304, SEQ ID NO: 312, SEQ ID NO: 313, SEQ ID NO: 314, SEQ ID NO: 315, SEQ ID NO: 316, SEQ ID NO: 317, SEQ ID NO: 318, SEQ ID NO: 319, SEQ ID NO: 320, SEQ ID NO: 321, SEQ ID NO: 322, SEQ ID NO: 323, SEQ ID NO: 324, SEQ ID NO: 325, SEQ ID NO: 326, SEQ ID NO: 327, SEQ ID NO: 328, SEQ ID NO: 329, SEQ ID NO: 330, SEQ ID NO: 331, SEQ ID NO: 332, SEQ ID NO: 333, SEQ ID NO: 334, SEQ ID NO: 335, SEQ ID NO: 336, SEQ ID NO: 337, SEQ ID NO: 338, SEQ ID NO: 339, SEQ ID NO: 340, SEQ ID NO: 341, SEQ ID NO: 342, SEQ ID NO: 343, SEQ ID NO: 344, SEQ ID NO: 345, SEQ ID NO: 346, SEQ ID NO: 347, SEQ ID NO: 348, SEQ ID NO: 349, SEQ ID NO: 381, SEQ ID NO: 382, SEQ ID NO: 383, SEQ ID NO: 384, SEQ ID NO: 385, SEQ ID NO: 386, SEQ ID NO: 387, SEQ ID NO: 388, SEQ ID NO: 389, SEQ ID NO: 390, SEQ ID NO: 391, SEQ ID NO: 392, SEQ ID NO: 393, SEQ ID NO: 394, SEQ ID NO: 395, SEQ ID NO: 396, SEQ ID NO: 397, SEQ ID NO: 398, SEQ ID NO: 399, SEQ ID NO: 400, SEQ ID NO: 401, SEQ ID NO: 402, SEQ ID NO: 403, SEQ ID NO: 404, SEQ ID NO: 405, SEQ ID NO: 406, SEQ ID NO: 407, SEQ ID NO: 408, SEQ ID NO: 409, SEQ ID NO: 410, SEQ ID NO: 411, SEQ ID NO: 412, SEQ ID NO: 413, SEQ ID NO: 414, SEQ ID NO: 415, SEQ ID NO: 416, SEQ ID NO: 417, SEQ ID NO: 418, SEQ ID NO: 419, SEQ ID NO: 420, SEQ ID NO: 421, SEQ ID NO: 422, SEQ ID NO: 423, SEQ ID NO: 424, or SEQ ID NO: 425.

[0547] In some examples of any of the ABPCs described herein, the first antigen-binding domain includes a light chain variable domain comprising SEQ ID NO: 482, and a heavy chain variable domain comprising: SEQ ID NO: 304, SEQ ID NO: 312, SEQ ID NO: 313, SEQ ID NO: 314, SEQ ID NO: 315, SEQ ID NO: 316, SEQ ID NO: 317, SEQ ID NO: 318, SEQ ID NO: 319, SEQ ID NO: 320, SEQ ID NO: 321, SEQ ID NO: 322, SEQ ID NO: 323, SEQ ID NO: 324, SEQ ID NO: 325, SEQ ID NO: 326, SEQ ID NO: 327, SEQ ID NO: 328, SEQ ID NO: 329, SEQ ID NO: 330, SEQ ID NO: 331, SEQ ID NO: 332, SEQ ID NO: 333, SEQ ID NO: 334, SEQ ID NO: 335, SEQ ID NO: 336, SEQ ID NO: 337, SEQ ID NO: 338, SEQ ID NO: 339, SEQ ID NO: 340, SEQ ID NO: 341, SEQ ID NO: 342, SEQ ID NO: 343, SEQ ID NO: 344, SEQ ID NO: 345, SEQ ID NO: 346, SEQ ID NO: 347, SEQ ID NO: 348, SEQ ID NO: 349, SEQ ID NO: 381, SEQ ID NO: 382, SEQ ID NO: 383, SEQ ID NO: 384, SEQ ID NO: 385, SEQ ID NO: 386, SEQ ID NO: 387, SEQ ID NO: 388, SEQ ID NO: 389, SEQ ID NO: 390, SEQ ID NO: 391, SEQ ID NO: 392, SEQ ID NO: 393, SEQ ID NO: 394, SEQ ID NO: 395, SEQ ID NO: 396, SEQ ID NO: 397, SEQ ID NO: 398, SEQ ID NO: 399, SEQ ID NO: 400, SEQ ID NO: 401, SEQ ID NO: 402, SEQ ID NO: 403, SEQ ID NO: 404, SEQ ID NO: 405, SEQ ID NO: 406, SEQ ID NO: 407, SEQ ID NO: 408, SEQ ID NO: 409, SEQ ID NO: 410, SEQ ID NO: 411, SEQ ID NO: 412, SEQ ID NO: 413, SEQ ID NO: 414, SEQ ID NO: 415, SEQ ID NO: 416, SEQ ID NO: 417, SEQ ID NO: 418, SEQ ID NO: 419, SEQ ID NO: 420, SEQ ID NO: 421, SEQ ID NO: 422, SEQ ID NO: 423, SEQ ID NO: 424, or SEQ ID NO: 425.

[0548] In some examples of any of the ABPCs described herein, the first antigen-binding domain includes a light chain variable domain comprising SEQ ID NO: 483, and a heavy chain variable domain comprising: SEQ ID NO: 304, SEQ ID NO: 312, SEQ ID NO: 313, SEQ ID NO: 314, SEQ ID NO: 315, SEQ ID NO: 316, SEQ ID NO: 317, SEQ ID NO: 318, SEQ ID NO: 319, SEQ ID NO: 320, SEQ ID NO: 321, SEQ ID NO: 322, SEQ ID NO: 323, SEQ ID NO: 324, SEQ ID NO: 325, SEQ ID NO: 326, SEQ ID NO: 327, SEQ ID NO: 328, SEQ ID NO: 329, SEQ ID NO: 330, SEQ ID NO: 331, SEQ ID NO: 332, SEQ ID NO: 333, SEQ ID NO: 334, SEQ ID NO: 335, SEQ ID NO: 336, SEQ ID NO: 337, SEQ ID NO: 338, SEQ ID NO: 339, SEQ ID NO: 340, SEQ ID NO: 341, SEQ ID NO: 342, SEQ ID NO: 343, SEQ ID NO: 344, SEQ ID NO: 345, SEQ ID NO: 346, SEQ ID NO: 347, SEQ ID NO: 348, SEQ ID NO: 349, SEQ ID NO: 381, SEQ ID NO: 382, SEQ ID NO: 383, SEQ ID NO: 384, SEQ ID NO: 385, SEQ ID NO: 386, SEQ ID NO: 387, SEQ ID NO: 388, SEQ ID NO: 389, SEQ ID NO: 390, SEQ ID NO: 391, SEQ ID NO: 392, SEQ ID NO: 393, SEQ ID NO: 394, SEQ ID NO: 395, SEQ ID NO: 396, SEQ ID NO: 397, SEQ ID NO: 398, SEQ ID NO: 399, SEQ ID NO: 400, SEQ ID NO: 401, SEQ ID NO: 402, SEQ ID NO: 403, SEQ ID NO: 404, SEQ ID NO: 405, SEQ ID NO: 406, SEQ ID NO: 407, SEQ ID NO: 408, SEQ ID NO: 409, SEQ ID NO: 410, SEQ ID NO: 411, SEQ ID NO: 412, SEQ ID NO: 413, SEQ ID NO: 414, SEQ ID NO: 415, SEQ ID NO: 416, SEQ ID NO: 417, SEQ ID NO: 418, SEQ ID NO: 419, SEQ ID NO: 420, SEQ ID NO: 421, SEQ ID NO: 422, SEQ ID NO: 423, SEQ ID NO: 424, or SEQ ID NO: 425.

[0549] In some examples of any of the ABPCs described herein, the first antigen-binding domain includes a light chain variable domain comprising SEQ ID NO: 484, and a heavy chain variable domain comprising: SEQ ID NO: 304, SEQ ID NO: 312, SEQ ID NO: 313, SEQ ID NO: 314, SEQ ID NO: 315, SEQ ID NO: 316, SEQ ID NO: 317, SEQ ID NO: 318, SEQ ID NO: 319, SEQ ID NO: 320, SEQ ID NO: 321, SEQ ID NO: 322, SEQ ID NO: 323, SEQ ID NO: 324, SEQ ID NO: 325, SEQ ID NO: 326, SEQ ID NO: 327, SEQ ID NO: 328, SEQ ID NO: 329, SEQ ID NO: 330, SEQ ID NO: 331, SEQ ID NO: 332, SEQ ID NO: 333, SEQ ID NO: 334, SEQ ID NO: 335, SEQ ID NO: 336, SEQ ID NO: 337, SEQ ID NO: 338, SEQ ID NO: 339, SEQ ID NO: 340, SEQ ID NO: 341, SEQ ID NO: 342, SEQ ID NO: 343, SEQ ID NO: 344, SEQ ID NO: 345, SEQ ID NO: 346, SEQ ID NO: 347, SEQ ID NO: 348, SEQ ID NO: 349, SEQ ID NO: 381, SEQ ID NO: 382, SEQ ID NO: 383, SEQ ID NO: 384, SEQ ID NO: 385, SEQ ID NO: 386, SEQ ID NO: 387, SEQ ID NO: 388, SEQ ID NO: 389, SEQ ID NO: 390, SEQ ID NO: 391, SEQ ID NO: 392, SEQ ID NO: 393, SEQ ID NO: 394, SEQ ID NO: 395, SEQ ID NO: 396, SEQ ID NO: 397, SEQ ID NO: 398, SEQ ID NO: 399, SEQ ID NO: 400, SEQ ID NO: 401, SEQ ID NO: 402, SEQ ID NO: 403, SEQ ID NO: 404, SEQ ID NO: 405, SEQ ID NO: 406, SEQ ID NO: 407, SEQ ID NO: 408, SEQ ID NO: 409, SEQ ID NO: 410, SEQ ID NO: 411, SEQ ID NO: 412, SEQ ID NO: 413, SEQ ID NO: 414, SEQ ID NO: 415, SEQ ID NO: 416, SEQ ID NO: 417, SEQ ID NO: 418, SEQ ID NO: 419, SEQ ID NO: 420, SEQ ID NO: 421, SEQ ID NO: 422, SEQ ID NO: 423, SEQ ID NO: 424, or SEQ ID NO: 425.

[0550] In some examples of any of the ABPCs described herein, the first antigen-binding domain includes a light chain variable domain comprising SEQ ID NO: 485, and a heavy chain variable domain comprising: SEQ ID NO: 304, SEQ ID NO: 312, SEQ ID NO: 313, SEQ ID NO: 314, SEQ ID NO: 315, SEQ ID NO: 316, SEQ ID NO: 317, SEQ ID NO: 318, SEQ ID NO: 319, SEQ ID NO: 320, SEQ ID NO: 321, SEQ ID NO: 322, SEQ ID NO: 323, SEQ ID NO: 324, SEQ ID NO: 325, SEQ ID NO: 326, SEQ ID NO: 327, SEQ ID NO: 328, SEQ ID NO: 329, SEQ ID NO: 330, SEQ ID NO: 331, SEQ ID NO: 332, SEQ ID NO: 333, SEQ ID NO: 334, SEQ ID NO: 335, SEQ ID NO: 336, SEQ ID NO: 337, SEQ ID NO: 338, SEQ ID NO: 339, SEQ ID NO: 340, SEQ ID NO: 341, SEQ ID NO: 342, SEQ ID NO: 343, SEQ ID NO: 344, SEQ ID NO: 345, SEQ ID NO: 346, SEQ ID NO: 347, SEQ ID NO: 348, SEQ ID NO: 349, SEQ ID NO: 381, SEQ ID NO: 382, SEQ ID NO: 383, SEQ ID NO: 384, SEQ ID NO: 385, SEQ ID NO: 386, SEQ ID NO: 387, SEQ ID NO: 388, SEQ ID NO: 389, SEQ ID NO: 390, SEQ ID NO: 391, SEQ ID NO: 392, SEQ ID NO: 393, SEQ ID NO: 394, SEQ ID NO: 395, SEQ ID NO: 396, SEQ ID NO: 397, SEQ ID NO: 398, SEQ ID NO: 399, SEQ ID NO: 400, SEQ ID NO: 401, SEQ ID NO: 402, SEQ ID NO: 403, SEQ ID NO: 404, SEQ ID NO: 405, SEQ ID NO: 406, SEQ ID NO: 407, SEQ ID NO: 408, SEQ ID NO: 409, SEQ ID NO: 410, SEQ ID NO: 411, SEQ ID NO: 412, SEQ ID NO: 413, SEQ ID NO: 414, SEQ ID NO: 415, SEQ ID NO: 416, SEQ ID NO: 417, SEQ ID NO: 418, SEQ ID NO: 419, SEQ ID NO: 420, SEQ ID NO: 421, SEQ ID NO: 422, SEQ ID NO: 423, SEQ ID NO: 424, or SEQ ID NO: 425.

[0551] In some examples of any of the ABPCs described herein, the first antigen-binding domain includes a light chain variable domain comprising SEQ ID NO: 486, and a heavy chain variable domain comprising: SEQ ID NO: 304, SEQ ID NO: 312, SEQ ID NO: 313, SEQ ID NO: 314, SEQ ID NO: 315, SEQ ID NO: 316, SEQ ID NO: 317, SEQ ID NO: 318, SEQ ID NO: 319, SEQ ID NO: 320, SEQ ID NO: 321, SEQ ID NO: 322, SEQ ID NO: 323, SEQ ID NO: 324, SEQ ID NO: 325, SEQ ID NO: 326, SEQ ID NO: 327, SEQ ID NO: 328, SEQ ID NO: 329, SEQ ID NO: 330, SEQ ID NO: 331, SEQ ID NO: 332, SEQ ID NO: 333, SEQ ID NO: 334, SEQ ID NO: 335, SEQ ID NO: 336, SEQ ID NO: 337, SEQ ID NO: 338, SEQ ID NO: 339, SEQ ID NO: 340, SEQ ID NO: 341, SEQ ID NO: 342, SEQ ID NO: 343, SEQ ID NO: 344, SEQ ID NO: 345, SEQ ID NO: 346, SEQ ID NO: 347, SEQ ID NO: 348, SEQ ID NO: 349, SEQ ID NO: 381, SEQ ID NO: 382, SEQ ID NO: 383, SEQ ID NO: 384, SEQ ID NO: 385, SEQ ID NO: 386, SEQ ID NO: 387, SEQ ID NO: 388, SEQ ID NO: 389, SEQ ID NO: 390, SEQ ID NO: 391, SEQ ID NO: 392, SEQ ID NO: 393, SEQ ID NO: 394, SEQ ID NO: 395, SEQ ID NO: 396, SEQ ID NO: 397, SEQ ID NO: 398, SEQ ID NO: 399, SEQ ID NO: 400, SEQ ID NO: 401, SEQ ID NO: 402, SEQ ID NO: 403, SEQ ID NO: 404, SEQ ID NO: 405, SEQ ID NO: 406, SEQ ID NO: 407, SEQ ID NO: 408, SEQ ID NO: 409, SEQ ID NO: 410, SEQ ID NO: 411, SEQ ID NO: 412, SEQ ID NO: 413, SEQ ID NO: 414, SEQ ID NO: 415, SEQ ID NO: 416, SEQ ID NO: 417, SEQ ID NO: 418, SEQ ID NO: 419, SEQ ID NO: 420, SEQ ID NO: 421, SEQ ID NO: 422, SEQ ID NO: 423, SEQ ID NO: 424, or SEQ ID NO: 425.

[0552] In some examples of any of the ABPCs described herein, the first antigen-binding domain includes a light chain variable domain comprising SEQ ID NO: 487, and a heavy chain variable domain comprising: SEQ ID NO: 304, SEQ ID NO: 312, SEQ ID NO: 313, SEQ ID NO: 314, SEQ ID NO: 315, SEQ ID NO: 316, SEQ ID NO: 317, SEQ ID NO: 318, SEQ ID NO: 319, SEQ ID NO: 320, SEQ ID NO: 321, SEQ ID NO: 322, SEQ ID NO: 323, SEQ ID NO: 324, SEQ ID NO: 325, SEQ ID NO: 326, SEQ ID NO: 327, SEQ ID NO: 328, SEQ ID NO: 329, SEQ ID NO: 330, SEQ ID NO: 331, SEQ ID NO: 332, SEQ ID NO: 333, SEQ ID NO: 334, SEQ ID NO: 335, SEQ ID NO: 336, SEQ ID NO: 337, SEQ ID NO: 338, SEQ ID NO: 339, SEQ ID NO: 340, SEQ ID NO: 341, SEQ ID NO: 342, SEQ ID NO: 343, SEQ ID NO: 344, SEQ ID NO: 345, SEQ ID NO: 346, SEQ ID NO: 347, SEQ ID NO: 348, SEQ ID NO: 349, SEQ ID NO: 381, SEQ ID NO: 382, SEQ ID NO: 383, SEQ ID NO: 384, SEQ ID NO: 385, SEQ ID NO: 386, SEQ ID NO: 387, SEQ ID NO: 388, SEQ ID NO: 389, SEQ ID NO: 390, SEQ ID NO: 391, SEQ ID NO: 392, SEQ ID NO: 393, SEQ ID NO: 394, SEQ ID NO: 395, SEQ ID NO: 396, SEQ ID NO: 397, SEQ ID NO: 398, SEQ ID NO: 399, SEQ ID NO: 400, SEQ ID NO: 401, SEQ ID NO: 402, SEQ ID NO: 403, SEQ ID NO: 404, SEQ ID NO: 405, SEQ ID NO: 406, SEQ ID NO: 407, SEQ ID NO: 408, SEQ ID NO: 409, SEQ ID NO: 410, SEQ ID NO: 411, SEQ ID NO: 412, SEQ ID NO: 413, SEQ ID NO: 414, SEQ ID NO: 415, SEQ ID NO: 416, SEQ ID NO: 417, SEQ ID NO: 418, SEQ ID NO: 419, SEQ ID NO: 420, SEQ ID NO: 421, SEQ ID NO: 422, SEQ ID NO: 423, SEQ ID NO: 424, or SEQ ID NO: 425.

[0553] In some examples of any of the ABPCs described herein, the first antigen-binding domain includes a light chain variable domain comprising SEQ ID NO: 488, and a heavy chain variable domain comprising: SEQ ID NO: 304, SEQ ID NO: 312, SEQ ID NO: 313, SEQ ID NO: 314, SEQ ID NO: 315, SEQ ID NO: 316, SEQ ID NO: 317, SEQ ID NO: 318, SEQ ID NO: 319, SEQ ID NO: 320, SEQ ID NO: 321, SEQ ID NO: 322, SEQ ID NO: 323, SEQ ID NO: 324, SEQ ID NO: 325, SEQ ID NO: 326, SEQ ID NO: 327, SEQ ID NO: 328, SEQ ID NO: 329, SEQ ID NO: 330, SEQ ID NO: 331, SEQ ID NO: 332, SEQ ID NO: 333, SEQ ID NO: 334, SEQ ID NO: 335, SEQ ID NO: 336, SEQ ID NO: 337, SEQ ID NO: 338, SEQ ID NO: 339, SEQ ID NO: 340, SEQ ID NO: 341, SEQ ID NO: 342, SEQ ID NO: 343, SEQ ID NO: 344, SEQ ID NO: 345, SEQ ID NO: 346, SEQ ID NO: 347, SEQ ID NO: 348, SEQ ID NO: 349, SEQ ID NO: 381, SEQ ID NO: 382, SEQ ID NO: 383, SEQ ID NO: 384, SEQ ID NO: 385, SEQ ID NO: 386, SEQ ID NO: 387, SEQ ID NO: 388, SEQ ID NO: 389, SEQ ID NO: 390, SEQ ID NO: 391, SEQ ID NO: 392, SEQ ID NO: 393, SEQ ID NO: 394, SEQ ID NO: 395, SEQ ID NO: 396, SEQ ID NO: 397, SEQ ID NO: 398, SEQ ID NO: 399, SEQ ID NO: 400, SEQ ID NO: 401, SEQ ID NO: 402, SEQ ID NO: 403, SEQ ID NO: 404, SEQ ID NO: 405, SEQ ID NO: 406, SEQ ID NO: 407, SEQ ID NO: 408, SEQ ID NO: 409, SEQ ID NO: 410, SEQ ID NO: 411, SEQ ID NO: 412, SEQ ID NO: 413, SEQ ID NO: 414, SEQ ID NO: 415, SEQ ID NO: 416, SEQ ID NO: 417, SEQ ID NO: 418, SEQ ID NO: 419, SEQ ID NO: 420, SEQ ID NO: 421, SEQ ID NO: 422, SEQ ID NO: 423, SEQ ID NO: 424, or SEQ ID NO: 425.

[0554] In some examples of any of the ABPCs described herein, the first antigen-binding domain includes a light chain variable domain comprising SEQ ID NO: 489, and a heavy chain variable domain comprising: SEQ ID NO: 304, SEQ ID NO: 312, SEQ ID NO: 313, SEQ ID NO: 314, SEQ ID NO: 315, SEQ ID NO: 316, SEQ ID NO: 317, SEQ ID NO: 318, SEQ ID NO: 319, SEQ ID NO: 320, SEQ ID NO: 321, SEQ ID NO: 322, SEQ ID NO: 323, SEQ ID NO: 324, SEQ ID NO: 325, SEQ ID NO: 326, SEQ ID NO: 327, SEQ ID NO: 328, SEQ ID NO: 329, SEQ ID NO: 330, SEQ ID NO: 331, SEQ ID NO: 332, SEQ ID NO: 333, SEQ ID NO: 334, SEQ ID NO: 335, SEQ ID NO: 336, SEQ ID NO: 337, SEQ ID NO: 338, SEQ ID NO: 339, SEQ ID NO: 340, SEQ ID NO: 341, SEQ ID NO: 342, SEQ ID NO: 343, SEQ ID NO: 344, SEQ ID NO: 345, SEQ ID NO: 346, SEQ ID NO: 347, SEQ ID NO: 348, SEQ ID NO: 349, SEQ ID NO: 381, SEQ ID NO: 382, SEQ ID NO: 383, SEQ ID NO: 384, SEQ ID NO: 385, SEQ ID NO: 386, SEQ ID NO: 387, SEQ ID NO: 388, SEQ ID NO: 389, SEQ ID NO: 390, SEQ ID NO: 391, SEQ ID NO: 392, SEQ ID NO: 393, SEQ ID NO: 394, SEQ ID NO: 395, SEQ ID NO: 396, SEQ ID NO: 397, SEQ ID NO: 398, SEQ ID NO: 399, SEQ ID NO: 400, SEQ ID NO: 401, SEQ ID NO: 402, SEQ ID NO: 403, SEQ ID NO: 404, SEQ ID NO: 405, SEQ ID NO: 406, SEQ ID NO: 407, SEQ ID NO: 408, SEQ ID NO: 409, SEQ ID NO: 410, SEQ ID NO: 411, SEQ ID NO: 412, SEQ ID NO: 413, SEQ ID NO: 414, SEQ ID NO: 415, SEQ ID NO: 416, SEQ ID NO: 417, SEQ ID NO: 418, SEQ ID NO: 419, SEQ ID NO: 420, SEQ ID NO: 421, SEQ ID NO: 422, SEQ ID NO: 423, SEQ ID NO: 424, or SEQ ID NO: 425.

[0555] In some examples of any of the ABPCs described herein, the first antigen-binding domain includes a light chain variable domain comprising SEQ ID NO: 490, and a heavy chain variable domain comprising: SEQ ID NO: 304, SEQ ID NO: 312, SEQ ID NO: 313, SEQ ID NO: 314, SEQ ID NO: 315, SEQ ID NO: 316, SEQ ID NO: 317, SEQ ID NO: 318, SEQ ID NO: 319, SEQ ID NO: 320, SEQ ID NO: 321, SEQ ID NO: 322, SEQ ID NO: 323, SEQ ID NO: 324, SEQ ID NO: 325, SEQ ID NO: 326, SEQ ID NO: 327, SEQ ID NO: 328, SEQ ID NO: 329, SEQ ID NO: 330, SEQ ID NO: 331, SEQ ID NO: 332, SEQ ID NO: 333, SEQ ID NO: 334, SEQ ID NO: 335, SEQ ID NO: 336, SEQ ID NO: 337, SEQ ID NO: 338, SEQ ID NO: 339, SEQ ID NO: 340, SEQ ID NO: 341, SEQ ID NO: 342, SEQ ID NO: 343, SEQ ID NO: 344, SEQ ID NO: 345, SEQ ID NO: 346, SEQ ID NO: 347, SEQ ID NO: 348, SEQ ID NO: 349, SEQ ID NO: 381, SEQ ID NO: 382, SEQ ID NO: 383, SEQ ID NO: 384, SEQ ID NO: 385, SEQ ID NO: 386, SEQ ID NO: 387, SEQ ID NO: 388, SEQ ID NO: 389, SEQ ID NO: 390, SEQ ID NO: 391, SEQ ID NO: 392, SEQ ID NO: 393, SEQ ID NO: 394, SEQ ID NO: 395, SEQ ID NO: 396, SEQ ID NO: 397, SEQ ID NO: 398, SEQ ID NO: 399, SEQ ID NO: 400, SEQ ID NO: 401, SEQ ID NO: 402, SEQ ID NO: 403, SEQ ID NO: 404, SEQ ID NO: 405, SEQ ID NO: 406, SEQ ID NO: 407, SEQ ID NO: 408, SEQ ID NO: 409, SEQ ID NO: 410, SEQ ID NO: 411, SEQ ID NO: 412, SEQ ID NO: 413, SEQ ID NO: 414, SEQ ID NO: 415, SEQ ID NO: 416, SEQ ID NO: 417, SEQ ID NO: 418, SEQ ID NO: 419, SEQ ID NO: 420, SEQ ID NO: 421, SEQ ID NO: 422, SEQ ID NO: 423, SEQ ID NO: 424, or SEQ ID NO: 425.

[0556] In some examples of any of the ABPCs described herein, the first antigen-binding domain includes a light chain variable domain comprising SEQ ID NO: 491, and a heavy chain variable domain comprising: SEQ ID NO: 304, SEQ ID NO: 312, SEQ ID NO: 313, SEQ ID NO: 314, SEQ ID NO: 315, SEQ ID NO: 316, SEQ ID NO: 317, SEQ ID NO: 318, SEQ ID NO: 319, SEQ ID NO: 320, SEQ ID NO: 321, SEQ ID NO: 322, SEQ ID NO: 323, SEQ ID NO: 324, SEQ ID NO: 325, SEQ ID NO: 326, SEQ ID NO: 327, SEQ ID NO: 328, SEQ ID NO: 329, SEQ ID NO: 330, SEQ ID NO: 331, SEQ ID NO: 332, SEQ ID NO: 333, SEQ ID NO: 334, SEQ ID NO: 335, SEQ ID NO: 336, SEQ ID NO: 337, SEQ ID NO: 338, SEQ ID NO: 339, SEQ ID NO: 340, SEQ ID NO: 341, SEQ ID NO: 342, SEQ ID NO: 343, SEQ ID NO: 344, SEQ ID NO: 345, SEQ ID NO: 346, SEQ ID NO: 347, SEQ ID NO: 348, SEQ ID NO: 349, SEQ ID NO: 381, SEQ ID NO: 382, SEQ ID NO: 383, SEQ ID NO: 384, SEQ ID NO: 385, SEQ ID NO: 386, SEQ ID NO: 387, SEQ ID NO: 388, SEQ ID NO: 389, SEQ ID NO: 390, SEQ ID NO: 391, SEQ ID NO: 392, SEQ ID NO: 393, SEQ ID NO: 394, SEQ ID NO: 395, SEQ ID NO: 396, SEQ ID NO: 397, SEQ ID NO: 398, SEQ ID NO: 399, SEQ ID NO: 400, SEQ ID NO: 401, SEQ ID NO: 402, SEQ ID NO: 403, SEQ ID NO: 404, SEQ ID NO: 405, SEQ ID NO: 406, SEQ ID NO: 407, SEQ ID NO: 408, SEQ ID NO: 409, SEQ ID NO: 410, SEQ ID NO: 411, SEQ ID NO: 412, SEQ ID NO: 413, SEQ ID NO: 414, SEQ ID NO: 415, SEQ ID NO: 416, SEQ ID NO: 417, SEQ ID NO: 418, SEQ ID NO: 419, SEQ ID NO: 420, SEQ ID NO: 421, SEQ ID NO: 422, SEQ ID NO: 423, SEQ ID NO: 424, or SEQ ID NO: 425.

[0557] In some examples of any of the ABPCs described herein, the first antigen-binding domain includes a light chain variable domain comprising SEQ ID NO: 492, and a heavy chain variable domain comprising: SEQ ID NO: 304, SEQ ID NO: 312, SEQ ID NO: 313, SEQ ID NO: 314, SEQ ID NO: 315, SEQ ID NO: 316, SEQ ID NO: 317, SEQ ID NO: 318, SEQ ID NO: 319, SEQ ID NO: 320, SEQ ID NO: 321, SEQ ID NO: 322, SEQ ID NO: 323, SEQ ID NO: 324, SEQ ID NO: 325, SEQ ID NO: 326, SEQ ID NO: 327, SEQ ID NO: 328, SEQ ID NO: 329, SEQ ID NO: 330, SEQ ID NO: 331, SEQ ID NO: 332, SEQ ID NO: 333, SEQ ID NO: 334, SEQ ID NO: 335, SEQ ID NO: 336, SEQ ID NO: 337, SEQ ID NO: 338, SEQ ID NO: 339, SEQ ID NO: 340, SEQ ID NO: 341, SEQ ID NO: 342, SEQ ID NO: 343, SEQ ID NO: 344, SEQ ID NO: 345, SEQ ID NO: 346, SEQ ID NO: 347, SEQ ID NO: 348, SEQ ID NO: 349, SEQ ID NO: 381, SEQ ID NO: 382, SEQ ID NO: 383, SEQ ID NO: 384, SEQ ID NO: 385, SEQ ID NO: 386, SEQ ID NO: 387, SEQ ID NO: 388, SEQ ID NO: 389, SEQ ID NO: 390, SEQ ID NO: 391, SEQ ID NO: 392, SEQ ID NO: 393, SEQ ID NO: 394, SEQ ID NO: 395, SEQ ID NO: 396, SEQ ID NO: 397, SEQ ID NO: 398, SEQ ID NO: 399, SEQ ID NO: 400, SEQ ID NO: 401, SEQ ID NO: 402, SEQ ID NO: 403, SEQ ID NO: 404, SEQ ID NO: 405, SEQ ID NO: 406, SEQ ID NO: 407, SEQ ID NO: 408, SEQ ID NO: 409, SEQ ID NO: 410, SEQ ID NO: 411, SEQ ID NO: 412, SEQ ID NO: 413, SEQ ID NO: 414, SEQ ID NO: 415, SEQ ID NO: 416, SEQ ID NO: 417, SEQ ID NO: 418, SEQ ID NO: 419, SEQ ID NO: 420, SEQ ID NO: 421, SEQ ID NO: 422, SEQ ID NO: 423, SEQ ID NO: 424, or SEQ ID NO: 425.

[0558] In some examples of any of the ABPCs described herein, the first antigen-binding domain includes a light chain variable domain comprising SEQ ID NO: 493, and a heavy chain variable domain comprising: SEQ ID NO: 304, SEQ ID NO: 312, SEQ ID NO: 313, SEQ ID NO: 314, SEQ ID NO: 315, SEQ ID NO: 316, SEQ ID NO: 317, SEQ ID NO: 318, SEQ ID NO: 319, SEQ ID NO: 320, SEQ ID NO: 321, SEQ ID NO: 322, SEQ ID NO: 323, SEQ ID NO: 324, SEQ ID NO: 325, SEQ ID NO: 326, SEQ ID NO: 327, SEQ ID NO: 328, SEQ ID NO: 329, SEQ ID NO: 330, SEQ ID NO: 331, SEQ ID NO: 332, SEQ ID NO: 333, SEQ ID NO: 334, SEQ ID NO: 335, SEQ ID NO: 336, SEQ ID NO: 337, SEQ ID NO: 338, SEQ ID NO: 339, SEQ ID NO: 340, SEQ ID NO: 341, SEQ ID NO: 342, SEQ ID NO: 343, SEQ ID NO: 344, SEQ ID NO: 345, SEQ ID NO: 346, SEQ ID NO: 347, SEQ ID NO: 348, SEQ ID NO: 349, SEQ ID NO: 381, SEQ ID NO: 382, SEQ ID NO: 383, SEQ ID NO: 384, SEQ ID NO: 385, SEQ ID NO: 386, SEQ ID NO: 387, SEQ ID NO: 388, SEQ ID NO: 389, SEQ ID NO: 390, SEQ ID NO: 391, SEQ ID NO: 392, SEQ ID NO: 393, SEQ ID NO: 394, SEQ ID NO: 395, SEQ ID NO: 396, SEQ ID NO: 397, SEQ ID NO: 398, SEQ ID NO: 399, SEQ ID NO: 400, SEQ ID NO: 401, SEQ ID NO: 402, SEQ ID NO: 403, SEQ ID NO: 404, SEQ ID NO: 405, SEQ ID NO: 406, SEQ ID NO: 407, SEQ ID NO: 408, SEQ ID NO: 409, SEQ ID NO: 410, SEQ ID NO: 411, SEQ ID NO: 412, SEQ ID NO: 413, SEQ ID NO: 414, SEQ ID NO: 415, SEQ ID NO: 416, SEQ ID NO: 417, SEQ ID NO: 418, SEQ ID NO: 419, SEQ ID NO: 420, SEQ ID NO: 421, SEQ ID NO: 422, SEQ ID NO: 423, SEQ ID NO: 424, or SEQ ID NO: 425.

[0559] In some examples of any of the ABPCs described herein, the first antigen-binding domain includes a light chain variable domain comprising SEQ ID NO: 494, and a heavy chain variable domain comprising: SEQ ID NO: 304, SEQ ID NO: 312, SEQ ID NO: 313, SEQ ID NO: 314, SEQ ID NO: 315, SEQ ID NO: 316, SEQ ID NO: 317, SEQ ID NO: 318, SEQ ID NO: 319, SEQ ID NO: 320, SEQ ID NO: 321, SEQ ID NO: 322, SEQ ID NO: 323, SEQ ID NO: 324, SEQ ID NO: 325, SEQ ID NO: 326, SEQ ID NO: 327, SEQ ID NO: 328, SEQ ID NO: 329, SEQ ID NO: 330, SEQ ID NO: 331, SEQ ID NO: 332, SEQ ID NO: 333, SEQ ID NO: 334, SEQ ID NO: 335, SEQ ID NO: 336, SEQ ID NO: 337, SEQ ID NO: 338, SEQ ID NO: 339, SEQ ID NO: 340, SEQ ID NO: 341, SEQ ID NO: 342, SEQ ID NO: 343, SEQ ID NO: 344, SEQ ID NO: 345, SEQ ID NO: 346, SEQ ID NO: 347, SEQ ID NO: 348, SEQ ID NO: 349, SEQ ID NO: 381, SEQ ID NO: 382, SEQ ID NO: 383, SEQ ID NO: 384, SEQ ID NO: 385, SEQ ID NO: 386, SEQ ID NO: 387, SEQ ID NO: 388, SEQ ID NO: 389, SEQ ID NO: 390, SEQ ID NO: 391, SEQ ID NO: 392, SEQ ID NO: 393, SEQ ID NO: 394, SEQ ID NO: 395, SEQ ID NO: 396, SEQ ID NO: 397, SEQ ID NO: 398, SEQ ID NO: 399, SEQ ID NO: 400, SEQ ID NO: 401, SEQ ID NO: 402, SEQ ID NO: 403, SEQ ID NO: 404, SEQ ID NO: 405, SEQ ID NO: 406, SEQ ID NO: 407, SEQ ID NO: 408, SEQ ID NO: 409, SEQ ID NO: 410, SEQ ID NO: 411, SEQ ID NO: 412, SEQ ID NO: 413, SEQ ID NO: 414, SEQ ID NO: 415, SEQ ID NO: 416, SEQ ID NO: 417, SEQ ID NO: 418, SEQ ID NO: 419, SEQ ID NO: 420, SEQ ID NO: 421, SEQ ID NO: 422, SEQ ID NO: 423, SEQ ID NO: 424, or SEQ ID NO: 425.

[0560] In some examples of any of the ABPCs described herein, the first antigen-binding domain includes a light chain variable domain comprising SEQ ID NO: 495, and a heavy chain variable domain comprising: SEQ ID NO: 304, SEQ ID NO: 312, SEQ ID NO: 313, SEQ ID NO: 314, SEQ ID NO: 315, SEQ ID NO: 316, SEQ ID NO: 317, SEQ ID NO: 318, SEQ ID NO: 319, SEQ ID NO: 320, SEQ ID NO: 321, SEQ ID NO: 322, SEQ ID NO: 323, SEQ ID NO: 324, SEQ ID NO: 325, SEQ ID NO: 326, SEQ ID NO: 327, SEQ ID NO: 328, SEQ ID NO: 329, SEQ ID NO: 330, SEQ ID NO: 331, SEQ ID NO: 332, SEQ ID NO: 333, SEQ ID NO: 334, SEQ ID NO: 335, SEQ ID NO: 336, SEQ ID NO: 337, SEQ ID NO: 338, SEQ ID NO: 339, SEQ ID NO: 340, SEQ ID NO: 341, SEQ ID NO: 342, SEQ ID NO: 343, SEQ ID NO: 344, SEQ ID NO: 345, SEQ ID NO: 346, SEQ ID NO: 347, SEQ ID NO: 348, SEQ ID NO: 349, SEQ ID NO: 381, SEQ ID NO: 382, SEQ ID NO: 383, SEQ ID NO: 384, SEQ ID NO: 385, SEQ ID NO: 386, SEQ ID NO: 387, SEQ ID NO: 388, SEQ ID NO: 389, SEQ ID NO: 390, SEQ ID NO: 391, SEQ ID NO: 392, SEQ ID NO: 393, SEQ ID NO: 394, SEQ ID NO: 395, SEQ ID NO: 396, SEQ ID NO: 397, SEQ ID NO: 398, SEQ ID NO: 399, SEQ ID NO: 400, SEQ ID NO: 401, SEQ ID NO: 402, SEQ ID NO: 403, SEQ ID NO: 404, SEQ ID NO: 405, SEQ ID NO: 406, SEQ ID NO: 407, SEQ ID NO: 408, SEQ ID NO: 409, SEQ ID NO: 410, SEQ ID NO: 411, SEQ ID NO: 412, SEQ ID NO: 413, SEQ ID NO: 414, SEQ ID NO: 415, SEQ ID NO: 416, SEQ ID NO: 417, SEQ ID NO: 418, SEQ ID NO: 419, SEQ ID NO: 420, SEQ ID NO: 421, SEQ ID NO: 422, SEQ ID NO: 423, SEQ ID NO: 424, or SEQ ID NO: 425.

[0561] In some examples of any of the ABPCs described herein, the first antigen-binding domain includes a light chain variable domain comprising SEQ ID NO: 496, and a heavy chain variable domain comprising: SEQ ID NO: 304, SEQ ID NO: 312, SEQ ID NO: 313, SEQ ID NO: 314, SEQ ID NO: 315, SEQ ID NO: 316, SEQ ID NO: 317, SEQ ID NO: 318, SEQ ID NO: 319, SEQ ID NO: 320, SEQ ID NO: 321, SEQ ID NO: 322, SEQ ID NO: 323, SEQ ID NO: 324, SEQ ID NO: 325, SEQ ID NO: 326, SEQ ID NO: 327, SEQ ID NO: 328, SEQ ID NO: 329, SEQ ID NO: 330, SEQ ID NO: 331, SEQ ID NO: 332, SEQ ID NO: 333, SEQ ID NO: 334, SEQ ID NO: 335, SEQ ID NO: 336, SEQ ID NO: 337, SEQ ID NO: 338, SEQ ID NO: 339, SEQ ID NO: 340, SEQ ID NO: 341, SEQ ID NO: 342, SEQ ID NO: 343, SEQ ID NO: 344, SEQ ID NO: 345, SEQ ID NO: 346, SEQ ID NO: 347, SEQ ID NO: 348, SEQ ID NO: 349, SEQ ID NO: 381, SEQ ID NO: 382, SEQ ID NO: 383, SEQ ID NO: 384, SEQ ID NO: 385, SEQ ID NO: 386, SEQ ID NO: 387, SEQ ID NO: 388, SEQ ID NO: 389, SEQ ID NO: 390, SEQ ID NO: 391, SEQ ID NO: 392, SEQ ID NO: 393, SEQ ID NO: 394, SEQ ID NO: 395, SEQ ID NO: 396, SEQ ID NO: 397, SEQ ID NO: 398, SEQ ID NO: 399, SEQ ID NO: 400, SEQ ID NO: 401, SEQ ID NO: 402, SEQ ID NO: 403, SEQ ID NO: 404, SEQ ID NO: 405, SEQ ID NO: 406, SEQ ID NO: 407, SEQ ID NO: 408, SEQ ID NO: 409, SEQ ID NO: 410, SEQ ID NO: 411, SEQ ID NO: 412, SEQ ID NO: 413, SEQ ID NO: 414, SEQ ID NO: 415, SEQ ID NO: 416, SEQ ID NO: 417, SEQ ID NO: 418, SEQ ID NO: 419, SEQ ID NO: 420, SEQ ID NO: 421, SEQ ID NO: 422, SEQ ID NO: 423, SEQ ID NO: 424, or SEQ ID NO: 425.

[0562] In some examples of any of the ABPCs described herein, the first antigen-binding domain includes a light chain variable domain comprising SEQ ID NO: 497, and a heavy chain variable domain comprising: SEQ ID NO: 304, SEQ ID NO: 312, SEQ ID NO: 313, SEQ ID NO: 314, SEQ ID NO: 315, SEQ ID NO: 316, SEQ ID NO: 317, SEQ ID NO: 318, SEQ ID NO: 319, SEQ ID NO: 320, SEQ ID NO: 321, SEQ ID NO: 322, SEQ ID NO: 323, SEQ ID NO: 324, SEQ ID NO: 325, SEQ ID NO: 326, SEQ ID NO: 327, SEQ ID NO: 328, SEQ ID NO: 329, SEQ ID NO: 330, SEQ ID NO: 331, SEQ ID NO: 332, SEQ ID NO: 333, SEQ ID NO: 334, SEQ ID NO: 335, SEQ ID NO: 336, SEQ ID NO: 337, SEQ ID NO: 338, SEQ ID NO: 339, SEQ ID NO: 340, SEQ ID NO: 341, SEQ ID NO: 342, SEQ ID NO: 343, SEQ ID NO: 344, SEQ ID NO: 345, SEQ ID NO: 346, SEQ ID NO: 347, SEQ ID NO: 348, SEQ ID NO: 349, SEQ ID NO: 381, SEQ ID NO: 382, SEQ ID NO: 383, SEQ ID NO: 384, SEQ ID NO: 385, SEQ ID NO: 386, SEQ ID NO: 387, SEQ ID NO: 388, SEQ ID NO: 389, SEQ ID NO: 390, SEQ ID NO: 391, SEQ ID NO: 392, SEQ ID NO: 393, SEQ ID NO: 394, SEQ ID NO: 395, SEQ ID NO: 396, SEQ ID NO: 397, SEQ ID NO: 398, SEQ ID NO: 399, SEQ ID NO: 400, SEQ ID NO: 401, SEQ ID NO: 402, SEQ ID NO: 403, SEQ ID NO: 404, SEQ ID NO: 405, SEQ ID NO: 406, SEQ ID NO: 407, SEQ ID NO: 408, SEQ ID NO: 409, SEQ ID NO: 410, SEQ ID NO: 411, SEQ ID NO: 412, SEQ ID NO: 413, SEQ ID NO: 414, SEQ ID NO: 415, SEQ ID NO: 416, SEQ ID NO: 417, SEQ ID NO: 418, SEQ ID NO: 419, SEQ ID NO: 420, SEQ ID NO: 421, SEQ ID NO: 422, SEQ ID NO: 423, SEQ ID NO: 424, or SEQ ID NO: 425.

[0563] In some examples of any of the ABPCs described herein, the first antigen-binding domain includes a light chain variable domain comprising SEQ ID NO: 498, and a heavy chain variable domain comprising: SEQ ID NO: 304, SEQ ID NO: 312, SEQ ID NO: 313, SEQ ID NO: 314, SEQ ID NO: 315, SEQ ID NO: 316, SEQ ID NO: 317, SEQ ID NO: 318, SEQ ID NO: 319, SEQ ID NO: 320, SEQ ID NO: 321, SEQ ID NO: 322, SEQ ID NO: 323, SEQ ID NO: 324, SEQ ID NO: 325, SEQ ID NO: 326, SEQ ID NO: 327, SEQ ID NO: 328, SEQ ID NO: 329, SEQ ID NO: 330, SEQ ID NO: 331, SEQ ID NO: 332, SEQ ID NO: 333, SEQ ID NO: 334, SEQ ID NO: 335, SEQ ID NO: 336, SEQ ID NO: 337, SEQ ID NO: 338, SEQ ID NO: 339, SEQ ID NO: 340, SEQ ID NO: 341, SEQ ID NO: 342, SEQ ID NO: 343, SEQ ID NO: 344, SEQ ID NO: 345, SEQ ID NO: 346, SEQ ID NO: 347, SEQ ID NO: 348, SEQ ID NO: 349, SEQ ID NO: 381, SEQ ID NO: 382, SEQ ID NO: 383, SEQ ID NO: 384, SEQ ID NO: 385, SEQ ID NO: 386, SEQ ID NO: 387, SEQ ID NO: 388, SEQ ID NO: 389, SEQ ID NO: 390, SEQ ID NO: 391, SEQ ID NO: 392, SEQ ID NO: 393, SEQ ID NO: 394, SEQ ID NO: 395, SEQ ID NO: 396, SEQ ID NO: 397, SEQ ID NO: 398, SEQ ID NO: 399, SEQ ID NO: 400, SEQ ID NO: 401, SEQ ID NO: 402, SEQ ID NO: 403, SEQ ID NO: 404, SEQ ID NO: 405, SEQ ID NO: 406, SEQ ID NO: 407, SEQ ID NO: 408, SEQ ID NO: 409, SEQ ID NO: 410, SEQ ID NO: 411, SEQ ID NO: 412, SEQ ID NO: 413, SEQ ID NO: 414, SEQ ID NO: 415, SEQ ID NO: 416, SEQ ID NO: 417, SEQ ID NO: 418, SEQ ID NO: 419, SEQ ID NO: 420, SEQ ID NO: 421, SEQ ID NO: 422, SEQ ID NO: 423, SEQ ID NO: 424, or SEQ ID NO: 425.

[0564] In some examples of any of the ABPCs described herein, the first antigen-binding domain includes a light chain variable domain comprising SEQ ID NO: 499, and a heavy chain variable domain comprising: SEQ ID NO: 304, SEQ ID NO: 312, SEQ ID NO: 313, SEQ ID NO: 314, SEQ ID NO: 315, SEQ ID NO: 316, SEQ ID NO: 317, SEQ ID NO: 318, SEQ ID NO: 319, SEQ ID NO: 320, SEQ ID NO: 321, SEQ ID NO: 322, SEQ ID NO: 323, SEQ ID NO: 324, SEQ ID NO: 325, SEQ ID NO: 326, SEQ ID NO: 327, SEQ ID NO: 328, SEQ ID NO: 329, SEQ ID NO: 330, SEQ ID NO: 331, SEQ ID NO: 332, SEQ ID NO: 333, SEQ ID NO: 334, SEQ ID NO: 335, SEQ ID NO: 336, SEQ ID NO: 337, SEQ ID NO: 338, SEQ ID NO: 339, SEQ ID NO: 340, SEQ ID NO: 341, SEQ ID NO: 342, SEQ ID NO: 343, SEQ ID NO: 344, SEQ ID NO: 345, SEQ ID NO: 346, SEQ ID NO: 347, SEQ ID NO: 348, SEQ ID NO: 349, SEQ ID NO: 381, SEQ ID NO: 382, SEQ ID NO: 383, SEQ ID NO: 384, SEQ ID NO: 385, SEQ ID NO: 386, SEQ ID NO: 387, SEQ ID NO: 388, SEQ ID NO: 389, SEQ ID NO: 390, SEQ ID NO: 391, SEQ ID NO: 392, SEQ ID NO: 393, SEQ ID NO: 394, SEQ ID NO: 395, SEQ ID NO: 396, SEQ ID NO: 397, SEQ ID NO: 398, SEQ ID NO: 399, SEQ ID NO: 400, SEQ ID NO: 401, SEQ ID NO: 402, SEQ ID NO: 403, SEQ ID NO: 404, SEQ ID NO: 405, SEQ ID NO: 406, SEQ ID NO: 407, SEQ ID NO: 408, SEQ ID NO: 409, SEQ ID NO: 410, SEQ ID NO: 411, SEQ ID NO: 412, SEQ ID NO: 413, SEQ ID NO: 414, SEQ ID NO: 415, SEQ ID NO: 416, SEQ ID NO: 417, SEQ ID NO: 418, SEQ ID NO: 419, SEQ ID NO: 420, SEQ ID NO: 421, SEQ ID NO: 422, SEQ ID NO: 423, SEQ ID NO: 424, or SEQ ID NO: 425.

[0565] In some examples of any of the ABPCs described herein, the first antigen-binding domain includes a light chain variable domain comprising SEQ ID NO: 500, and a heavy chain variable domain comprising: SEQ ID NO: 304, SEQ ID NO: 312, SEQ ID NO: 313, SEQ ID NO: 314, SEQ ID NO: 315, SEQ ID NO: 316, SEQ ID NO: 317, SEQ ID NO: 318, SEQ ID NO: 319, SEQ ID NO: 320, SEQ ID NO: 321, SEQ ID NO: 322, SEQ ID NO: 323, SEQ ID NO: 324, SEQ ID NO: 325, SEQ ID NO: 326, SEQ ID NO: 327, SEQ ID NO: 328, SEQ ID NO: 329, SEQ ID NO: 330, SEQ ID NO: 331, SEQ ID NO: 332, SEQ ID NO: 333, SEQ ID NO: 334, SEQ ID NO: 335, SEQ ID NO: 336, SEQ ID NO: 337, SEQ ID NO: 338, SEQ ID NO: 339, SEQ ID NO: 340, SEQ ID NO: 341, SEQ ID NO: 342, SEQ ID NO: 343, SEQ ID NO: 344, SEQ ID NO: 345, SEQ ID NO: 346, SEQ ID NO: 347, SEQ ID NO: 348, SEQ ID NO: 349, SEQ ID NO: 381, SEQ ID NO: 382, SEQ ID NO: 383, SEQ ID NO: 384, SEQ ID NO: 385, SEQ ID NO: 386, SEQ ID NO: 387, SEQ ID NO: 388, SEQ ID NO: 389, SEQ ID NO: 390, SEQ ID NO: 391, SEQ ID NO: 392, SEQ ID NO: 393, SEQ ID NO: 394, SEQ ID NO: 395, SEQ ID NO: 396, SEQ ID NO: 397, SEQ ID NO: 398, SEQ ID NO: 399, SEQ ID NO: 400, SEQ ID NO: 401, SEQ ID NO: 402, SEQ ID NO: 403, SEQ ID NO: 404, SEQ ID NO: 405, SEQ ID NO: 406, SEQ ID NO: 407, SEQ ID NO: 408, SEQ ID NO: 409, SEQ ID NO: 410, SEQ ID NO: 411, SEQ ID NO: 412, SEQ ID NO: 413, SEQ ID NO: 414, SEQ ID NO: 415, SEQ ID NO: 416, SEQ ID NO: 417, SEQ ID NO: 418, SEQ ID NO: 419, SEQ ID NO: 420, SEQ ID NO: 421, SEQ ID NO: 422, SEQ ID NO: 423, SEQ ID NO: 424, or SEQ ID NO: 425.

[0566] In some examples of any of the ABPCs described herein, the first antigen-binding domain includes a light chain variable domain comprising SEQ ID NO: 501, and a heavy chain variable domain comprising: SEQ ID NO: 304, SEQ ID NO: 312, SEQ ID NO: 313, SEQ ID NO: 314, SEQ ID NO: 315, SEQ ID NO: 316, SEQ ID NO: 317, SEQ ID NO: 318, SEQ ID NO: 319, SEQ ID NO: 320, SEQ ID NO: 321, SEQ ID NO: 322, SEQ ID NO: 323, SEQ ID NO: 324, SEQ ID NO: 325, SEQ ID NO: 326, SEQ ID NO: 327, SEQ ID NO: 328, SEQ ID NO: 329, SEQ ID NO: 330, SEQ ID NO: 331, SEQ ID NO: 332, SEQ ID NO: 333, SEQ ID NO: 334, SEQ ID NO: 335, SEQ ID NO: 336, SEQ ID NO: 337, SEQ ID NO: 338, SEQ ID NO: 339, SEQ ID NO: 340, SEQ ID NO: 341, SEQ ID NO: 342, SEQ ID NO: 343, SEQ ID NO: 344, SEQ ID NO: 345, SEQ ID NO: 346, SEQ ID NO: 347, SEQ ID NO: 348, SEQ ID NO: 349, SEQ ID NO: 381, SEQ ID NO: 382, SEQ ID NO: 383, SEQ ID NO: 384, SEQ ID NO: 385, SEQ ID NO: 386, SEQ ID NO: 387, SEQ ID NO: 388, SEQ ID NO: 389, SEQ ID NO: 390, SEQ ID NO: 391, SEQ ID NO: 392, SEQ ID NO: 393, SEQ ID NO: 394, SEQ ID NO: 395, SEQ ID NO: 396, SEQ ID NO: 397, SEQ ID NO: 398, SEQ ID NO: 399, SEQ ID NO: 400, SEQ ID NO: 401, SEQ ID NO: 402, SEQ ID NO: 403, SEQ ID NO: 404, SEQ ID NO: 405, SEQ ID NO: 406, SEQ ID NO: 407, SEQ ID NO: 408, SEQ ID NO: 409, SEQ ID NO: 410, SEQ ID NO: 411, SEQ ID NO: 412, SEQ ID NO: 413, SEQ ID NO: 414, SEQ ID NO: 415, SEQ ID NO: 416, SEQ ID NO: 417, SEQ ID NO: 418, SEQ ID NO: 419, SEQ ID NO: 420, SEQ ID NO: 421, SEQ ID NO: 422, SEQ ID NO: 423, SEQ ID NO: 424, or SEQ ID NO: 425.

[0567] In some examples of any of the ABPCs described herein, the first antigen-binding domain includes a heavy chain variable domain of a P3D12 with one or more (e.g., one, two, three, four, five, six, seven, eight, nine, ten, eleven, twelve, thirteen, fourteen, fifteen, sixteen, seventeen, eighteen, nineteen, or twenty) amino acids substituted with a histidine. In some examples of any of the ABPCs described herein, the first antigen-binding domain includes a light chain variable domain of P3D12 with one or more (e.g., one, two, three, four, five, six, seven, eight, nine, ten, eleven, twelve, thirteen, fourteen, fifteen, sixteen, seventeen, eighteen, nineteen, or twenty) amino acids substituted with a histidine. In some examples of any of the ABPCs described herein, the first antigen-binding domain includes a heavy chain variable domain of P3D12 with one or more (e.g., one, two, three, four, five, six, seven, eight, nine, ten, eleven, twelve, thirteen, fourteen, fifteen, sixteen, seventeen, eighteen, nineteen, or twenty) amino acids substituted with a histidine; and a light chain variable domain of P3D12 with one or more (e.g., one, two, three, four, five, six, seven, eight, nine, ten, eleven, twelve, thirteen, fourteen, fifteen, sixteen, seventeen, eighteen, nineteen, or twenty) amino acids substituted with a histidine. In some examples of any of the ABPCs described herein, the heavy chain variable domain of P3D12 comprises SEQ ID NO: 502. In some examples of any of the ABPCs described herein, the light chain variable domain of P3D12 comprises SEQ ID NO: 503.

[0568] In some examples of any of the ABPCs described herein, the first antigen-binding domain comprises a heavy chain variable domain comprising a CDR1, a CDR2, and a CDR3 of SEQ ID NO: 504, SEQ ID NO: 505, and SEQ ID NO: 506, respectively, with collectively a total of one or more (e.g., one, two, three, four, five, six, seven, eight, nine, or ten) amino acid positions in SEQ ID NOs: 504-506 substituted with a histidine. In some examples of any of the ABPCs described herein, the first antigen-binding domain comprises a light chain variable domain comprising a CDR1, a CDR2, and a CDR3 of SEQ ID NO: 507, SEQ ID NO: 508, and SEQ ID NO: 509, respectively, with collectively a total of one or more (e.g., one, two, three, four, five, six, seven, eight, nine, or ten) amino acid positions in SEQ ID NOs: 507-509 substituted with a histidine. In some examples of any of the ABPCs described herein, the first antigen-binding domain includes: a heavy chain variable domain comprising a CDR1, a CDR2, and a CDR3 of SEQ ID NO: 504, SEQ ID NO: 505, and SEQ ID NO: 506, respectively, with collectively a total of one or more (e.g., one, two, three, four, five, six, seven, eight, nine, or ten) amino acid positions in SEQ ID NOs: 504-506 substituted with a histidine; and a light chain variable domain comprising a CDR1, a CDR2, and a CDR3 of SEQ ID NO: 507, SEQ ID NO: 508, and SEQ ID NO: 509, respectively, with collectively a total of one or more (e.g., one, two, three, four, five, six, seven, eight, nine, or ten) amino acid positions in SEQ ID NOs: 507-509 substituted with a histidine.

[0569] In some examples of any of the ABPCs described herein, the first antigen-binding domain includes a heavy chain variable domain that is at least 90% (e.g., at least 92%, at least 94%, at least 96%, at least 98%, at least 99%, or 100%) identical to SEQ ID NO: 502, where the heavy chain variable domain includes a histidine at one or more (e.g., one, two, three, four, five, six, seven, eight, nine, ten, eleven, twelve, thirteen, fourteen, fifteen, sixteen, seventeen, eighteen, nineteen, or twenty) amino acid positions in SEQ ID NO: 502 selected from the group consisting of: 27, 29, 30, 32, 33, 34, 50, 51, 52, 53, 57, 59, 98, 100, 101, 102, 103, 106, and 107. In some examples of any of the ABPCs described herein, the first antigen-binding domain includes a light chain variable domain that is at least 90% (e.g., at least 92%, at least 94%, at least 96%, at least 98%, at least 99%, or 100%) identical to SEQ ID NO: 503, where the light chain variable domain includes a histidine at one or more (e.g., one, two, three, four, five, six, seven, eight, nine, ten, eleven, twelve, thirteen, fourteen, fifteen, sixteen, seventeen, eighteen, nineteen, or twenty) amino acid positions in SEQ ID NO: 503 selected from the group consisting of: 25, 29, 31, 32, 33, 34, 35, 52, 55, 91, 92, 93, 94, 95, 96, 97, and 98. In some examples of any of the ABPCs described herein the first antigen-binding domain includes: a heavy chain variable domain that is at least 90% (e.g., at least 92%, at least 94%, at least 96%, at least 98%, at least 99%, or 100%) identical to SEQ ID NO: 502, where the heavy chain variable domain includes a histidine at one or more (e.g., one, two, three, four, five, six, seven, eight, nine, ten, eleven, twelve, thirteen, fourteen, fifteen, sixteen, seventeen, eighteen, nineteen, or twenty) amino acid positions in SEQ ID NO: 502 selected from the group consisting of: 27, 29, 30, 32, 33, 34, 50, 51, 52, 53, 57, 59, 98, 100, 101, 102, 103, 106, and 107, and a light chain variable domain that is at least 90% (e.g., at least 92%, at least 94%, at least 96%, at least 98%, at least 99%, or 100%) identical to SEQ ID NO: 503, where the light chain variable domain includes a histidine at one or more (e.g., one, two, three, four, five, six, seven, eight, nine, ten, eleven, twelve, thirteen, fourteen, fifteen, sixteen, seventeen, eighteen, nineteen, or twenty) amino acid positions in SEQ ID NO: 503 selected from the group consisting of: 25, 29, 31, 32, 33, 34, 35, 52, 55, 91, 92, 93, 94, 95, 96, 97, and 98.

[0570] In some examples of any of the ABPCs described herein, the first antigen-binding domain includes a heavy chain variable domain that is at least 90% (e.g., at least 92%, at least 94%, at least 96%, at least 98%, at least 99%, or 100%) identical to SEQ ID NO: 502, where the heavy chain variable domain includes an alanine at position 35 in SEQ ID NO: 502.

[0571] In some examples of any of the ABPCs described herein the first antigen-binding domain includes: a heavy chain variable domain that is at least 90% (e.g., at least 92%, at least 94%, at least 96%, at least 98%, at least 99%, or 100%) identical to SEQ ID NO: 502, where the heavy chain variable domain includes an alanine at position 35 in SEQ ID NO: 502, and a light chain variable domain that is at least 90% (e.g., at least 92%, at least 94%, at least 96%, at least 98%, at least 99%, or 100%) identical to SEQ ID NO: 503, where the light chain variable domain includes a histidine at one or more (e.g., one, two, three, four, five, six, seven, eight, nine, ten, eleven, twelve, thirteen, fourteen, fifteen, sixteen, seventeen, eighteen, nineteen, or twenty) amino acid positions in SEQ ID NO: 503 selected from the group consisting of: 25, 29, 31, 32, 33, 34, 35, 52, 55, 91, 92, 93, 94, 95, 96, 97, and 98.

[0572] In some examples of any of the ABPCs described herein, the first antigen-binding domain includes a heavy chain variable domain that is at least 90% (e.g., at least 92%, at least 94%, at least 96%, at least 98%, at least 99%, or 100%) identical to SEQ ID NO: 502, where the heavy chain variable domain includes a histidine at one or more (e.g., one, two, three, four, five, six, seven, eight, nine, ten, eleven, twelve, thirteen, fourteen, fifteen, sixteen, seventeen, eighteen, nineteen, or twenty) amino acid positions in SEQ ID NO: 502 selected from the group consisting of: 27, 29, 30, 32, 33, 34, 50, 51, 52, 53, 57, 59, 98, 100, 101, 102, 103, 106, and 107, and where the heavy chain variable domain includes an alanine at position 35 in SEQ ID NO: 502. In some examples of any of the ABPCs described herein the first antigen-binding domain includes: a heavy chain variable domain that is at least 90% (e.g., at least 92%, at least 94%, at least 96%, at least 98%, at least 99%, or 100%) identical to SEQ ID NO: 502, where the heavy chain variable domain includes a histidine at one or more (e.g., one, two, three, four, five, six, seven, eight, nine, ten, eleven, twelve, thirteen, fourteen, fifteen, sixteen, seventeen, eighteen, nineteen, or twenty) amino acid positions in SEQ ID NO: 502 selected from the group consisting of: 27, 29, 30, 32, 33, 34, 50, 51, 52, 53, 57, 59, 98, 100, 101, 102, 103, 106, and 107, and where the heavy chain variable domain includes an alanine at position 35 in SEQ ID NO: 502, and a light chain variable domain that is at least 90% (e.g., at least 92%, at least 94%, at least 96%, at least 98%, at least 99%, or 100%) identical to SEQ ID NO: 503, where the light chain variable domain includes a histidine at one or more (e.g., one, two, three, four, five, six, seven, eight, nine, ten, eleven, twelve, thirteen, fourteen, fifteen, sixteen, seventeen, eighteen, nineteen, or twenty) amino acid positions in SEQ ID NO: 503 selected from the group consisting of: 25, 29, 31, 32, 33, 34, 35, 52, 55, 91, 92, 93, 94, 95, 96, 97, and 98.

[0573] In some examples of any of the ABPCs described herein, a heavy chain variable domain includes a heavy chain variable domain that is at least 90% (e.g., at least 92%, at least 94%, at least 96%, at least 98%, at least 99%, or 100%) identical to SEQ ID NO: 502, where the heavy chain variable domain includes a histidine at any of the specific combinations of one or more amino acid positions in SEQ ID NO: 502 listed in Table 7.

TABLE 7
Exemplary Combinations of Amino Acid Positions in SEQ
ID NO: 502 that can be Substituted with Histidine

27 + 29, 27 + 30, 27 + 32, 27 + 33, 27 + 34, 27 + 50, 27 + 51, 27 + 52, 27 + 53, 27 + 57, 27 +
59, 27 + 98, 27 + 100, 27 + 101, 27 + 102, 27 + 103, 27 + 106, 27 + 107, 29 + 30, 29 +
32, 29 + 33, 29 + 34, 29 + 50, 29 + 51, 29 + 52, 29 + 53, 29 + 57, 29 + 59, 29 + 98, 29 +
100, 29 + 101, 29 + 102, 29 + 103, 29 + 106, 29 + 107, 30 + 32, 30 + 33, 30 + 34, 30 + 50,
30 + 51, 30 + 52, 30 + 53, 30 + 57, 30 + 59, 30 + 98, 30 + 100, 30 + 101, 30 + 102, 30 +
103, 30 + 106, 30 + 107, 32 + 33, 32 + 34, 32 + 50, 32 + 51, 32 + 52, 32 + 53, 32 + 57, 32 +
59, 32 + 98, 32 + 100, 32 + 101, 32 + 102, 32 + 103, 32 + 106, 32 + 107, 33 + 34, 33 +
50, 33 + 51, 33 + 52, 33 + 53, 33 + 57, 33 + 59, 33 + 98, 33 + 100, 33 + 101, 33 + 102, 33 +
103, 33 + 106, 33 + 107, 34 + 50, 34 + 51, 34 + 52, 34 + 53, 34 + 57, 34 + 59, 34 + 98,
34 + 100, 34 + 101, 34 + 102, 34 + 103, 34 + 106, 34 + 107, 50 + 51, 50 + 52, 50 + 53, 50 +
57, 50 + 59, 50 + 98, 50 + 100, 50 + 101, 50 + 102, 50 + 103, 50 + 106, 50 + 107, 51 +
52, 51 + 53, 51 + 57, 51 + 59, 51 + 98, 51 + 100, 51 + 101, 51 + 102, 51 + 103, 51 + 106,
51 + 107, 52 + 53, 52 + 57, 52 + 59, 52 + 98, 52 + 100, 52 + 101, 52 + 102, 52 + 103, 52 +
106, 52 + 107, 53 + 57, 53 + 59, 53 + 98, 53 + 100, 53 + 101, 53 + 102, 53 + 103, 53 +
106, 53 + 107, 57 + 59, 57 + 98, 57 + 100, 57 + 101, 57 + 102, 57 + 103, 57 + 106, 57 +
107, 59 + 98, 59 + 100, 59 + 101, 59 + 102, 59 + 103, 59 + 106, 59 + 107, 98 + 100, 98 +
101, 98 + 102, 98 + 103, 98 + 106, 98 + 107, 100 + 101, 100 + 102, 100 + 103, 100 + 106,
100 + 107, 101 + 102, 101 + 103, 101 + 106, 101 + 107, 102 + 103, 102 + 106, 102 + 107,
103 + 106, 103 + 107, 106 + 107, 27 + 29 + 30, 27 + 29 + 32, 27 + 29 + 33, 27 + 29 + 34,
27 + 29 + 50, 27 + 29 + 51, 27 + 29 + 52, 27 + 29 + 53, 27 + 29 + 57, 27 + 29 + 59, 27 +
29 + 98, 27 + 29 + 100, 27 + 29 + 101, 27 + 29 + 102, 27 + 29 + 103, 27 + 29 + 106, 27 +
29 + 107, 27 + 30 + 32, 27 + 30 + 33, 27 + 30 + 34, 27 + 30 + 50, 27 + 30 + 51, 27 + 30 +
52, 27 + 30 + 53, 27 + 30 + 57, 27 + 30 + 59, 27 + 30 + 98, 27 + 30 + 100, 27 + 30 + 101,
27 + 30 + 102, 27 + 30 + 103, 27 + 30 + 106, 27 + 30 + 107, 27 + 32 + 33, 27 + 32 + 34,
27 + 32 + 50, 27 + 32 + 51, 27 + 32 + 52, 27 + 32 + 53, 27 + 32 + 57, 27 + 32 + 59, 27 +
32 + 98, 27 + 32 + 100, 27 + 32 + 101, 27 + 32 + 102, 27 + 32 + 103, 27 + 32 + 106, 27 +
32 + 107, 27 + 33 + 34, 27 + 33 + 50, 27 + 33 + 51, 27 + 33 + 52, 27 + 33 + 53, 27 + 33 +
57, 27 + 33 + 59, 27 + 33 + 98, 27 + 33 + 100, 27 + 33 + 101, 27 + 33 + 102, 27 + 33 +
103, 27 + 33 + 106, 27 + 33 + 107, 27 + 34 + 50, 27 + 34 + 51, 27 + 34 + 52, 27 + 34 + 53,
27 + 34 + 57, 27 + 34 + 59, 27 + 34 + 98, 27 + 34 + 100, 27 + 34 + 101, 27 + 34 + 102, 27 +
34 + 103, 27 + 34 + 106, 27 + 34 + 107, 27 + 50 + 51, 27 + 50 + 52, 27 + 50 + 53, 27 +
50 + 57, 27 + 50 + 59, 27 + 50 + 98, 27 + 50 + 100, 27 + 50 + 101, 27 + 50 + 102, 27 + 50 +
103, 27 + 50 + 106, 27 + 50 + 107, 27 + 51 + 52, 27 + 51 + 53, 27 + 51 + 57, 27 + 51 +
59, 27 + 51 + 98, 27 + 51 + 100, 27 + 51 + 101, 27 + 51 + 102, 27 + 51 + 103, 27 + 51 +
106, 27 + 51 + 107, 27 + 52 + 53, 27 + 52 + 57, 27 + 52 + 59, 27 + 52 + 98, 27 + 52 + 100,
27 + 52 + 101, 27 + 52 + 102, 27 + 52 + 103, 27 + 52 + 106, 27 + 52 + 107, 27 + 53 + 57,
27 + 53 + 59, 27 + 53 + 98, 27 + 53 + 100, 27 + 53 + 101, 27 + 53 + 102, 27 + 53 + 103,
27 + 53 + 106, 27 + 53 + 107, 27 + 57 + 59, 27 + 57 + 98, 27 + 57 + 100, 27 + 57 + 101,
27 + 57 + 102, 27 + 57 + 103, 27 + 57 + 106, 27 + 57 + 107, 27 + 59 + 98, 27 + 59 + 100,
27 + 59 + 101, 27 + 59 + 102, 27 + 59 + 103, 27 + 59 + 106, 27 + 59 + 107, 27 + 98 + 100,
27 + 98 + 101, 27 + 98 + 102, 27 + 98 + 103, 27 + 98 + 106, 27 + 98 + 107, 27 + 100 +
101, 27 + 100 + 102, 27 + 100 + 103, 27 + 100 + 106, 27 + 100 + 107, 27 + 101 + 102, 27 +
101 + 103, 27 + 101 + 106, 27 + 101 + 107, 27 + 102 + 103, 27 + 102 + 106, 27 + 102 +
107, 27 + 103 + 106, 27 + 103 + 107, 27 + 106 + 107, 29 + 30 + 32, 29 + 30 + 33, 29 + 30 +
34, 29 + 30 + 50, 29 + 30 + 51, 29 + 30 + 52, 29 + 30 + 53, 29 + 30 + 57, 29 + 30 + 59,
29 + 30 + 98, 29 + 30 + 100, 29 + 30 + 101, 29 + 30 + 102, 29 + 30 + 103, 29 + 30 + 106,
29 + 30 + 107, 29 + 32 + 33, 29 + 32 + 34, 29 + 32 + 50, 29 + 32 + 51, 29 + 32 + 52, 29 +
32 + 53, 29 + 32 + 57, 29 + 32 + 59, 29 + 32 + 98, 29 + 32 + 100, 29 + 32 + 101, 29 + 32 +
102, 29 + 32 + 103, 29 + 32 + 106, 29 + 32 + 107, 29 + 33 + 34, 29 + 33 + 50, 29 + 33 +
51, 29 + 33 + 52, 29 + 33 + 53, 29 + 33 + 57, 29 + 33 + 59, 29 + 33 + 98, 29 + 33 + 100,
29 + 33 + 101, 29 + 33 + 102, 29 + 33 + 103, 29 + 33 + 106, 29 + 33 + 107, 29 + 34 + 50,
29 + 34 + 51, 29 + 34 + 52, 29 + 34 + 53, 29 + 34 + 57, 29 + 34 + 59, 29 + 34 + 98, 29 +
34 + 100, 29 + 34 + 101, 29 + 34 + 102, 29 + 34 + 103, 29 + 34 + 106, 29 + 34 + 107, 29 +
50 + 51, 29 + 50 + 52, 29 + 50 + 53, 29 + 50 + 57, 29 + 50 + 59, 29 + 50 + 98, 29 + 50 +
100, 29 + 50 + 101, 29 + 50 + 102, 29 + 50 + 103, 29 + 50 + 106, 29 + 50 + 107, 29 + 51 +
52, 29 + 51 + 53, 29 + 51 + 57, 29 + 51 + 59, 29 + 51 + 98, 29 + 51 + 100, 29 + 51 + 101,
29 + 51 + 102, 29 + 51 + 103, 29 + 51 + 106, 29 + 51 + 107, 29 + 52 + 53, 29 + 52 + 57,
29 + 52 + 59, 29 + 52 + 98, 29 + 52 + 100, 29 + 52 + 101, 29 + 52 + 102, 29 + 52 + 103,
29 + 52 + 106, 29 + 52 + 107, 29 + 53 + 57, 29 + 53 + 59, 29 + 53 + 98, 29 + 53 + 100, 29 +
53 + 101, 29 + 53 + 102, 29 + 53 + 103, 29 + 53 + 106, 29 + 53 + 107, 29 + 57 + 59, 29 +
57 + 98, 29 + 57 + 100, 29 + 57 + 101, 29 + 57 + 102, 29 + 57 + 103, 29 + 57 + 106, 29 +
57 + 107, 29 + 59 + 98, 29 + 59 + 100, 29 + 59 + 101, 29 + 59 + 102, 29 + 59 + 103, 29 +
59 + 106, 29 + 59 + 107, 29 + 98 + 100, 29 + 98 + 101, 29 + 98 + 102, 29 + 98 + 103, 29 +
98 + 106, 29 + 98 + 107, 29 + 100 + 101, 29 + 100 + 102, 29 + 100 + 103, 29 + 100 +
106, 29 + 100 + 107, 29 + 101 + 102, 29 + 101 + 103, 29 + 101 + 106, 29 + 101 + 107, 29 +
102 + 103, 29 + 102 + 106, 29 + 102 + 107, 29 + 103 + 106, 29 + 103 + 107, 29 + 106 +
107, 30 + 32 + 33, 30 + 32 + 34, 30 + 32 + 50, 30 + 32 + 51, 30 + 32 + 52, 30 + 32 + 53,
30 + 32 + 57, 30 + 32 + 59, 30 + 32 + 98, 30 + 32 + 100, 30 + 32 + 101, 30 + 32 + 102, 30 +
32 + 103, 30 + 32 + 106, 30 + 32 + 107, 30 + 33 + 34, 30 + 33 + 50, 30 + 33 + 51, 30 +
33 + 52, 30 + 33 + 53, 30 + 33 + 57, 30 + 33 + 59, 30 + 33 + 98, 30 + 33 + 100, 30 + 33 +
101, 30 + 33 + 102, 30 + 33 + 103, 30 + 33 + 106, 30 + 33 + 107, 30 + 34 + 50, 30 + 34 +
51, 30 + 34 + 52, 30 + 34 + 53, 30 + 34 + 57, 30 + 34 + 59, 30 + 34 + 98, 30 + 34 + 100,
30 + 34 + 101, 30 + 34 + 102, 30 + 34 + 103, 30 + 34 + 106, 30 + 34 + 107, 30 + 50 + 51,
30 + 50 + 52, 30 + 50 + 53, 30 + 50 + 57, 30 + 50 + 59, 30 + 50 + 98, 30 + 50 + 100, 30 +
50 + 101, 30 + 50 + 102, 30 + 50 + 103, 30 + 50 + 106, 30 + 50 + 107, 30 + 51 + 52, 30 +
51 + 53, 30 + 51 + 57, 30 + 51 + 59, 30 + 51 + 98, 30 + 51 + 100, 30 + 51 + 101, 30 + 51 +
102, 30 + 51 + 103, 30 + 51 + 106, 30 + 51 + 107, 30 + 52 + 53, 30 + 52 + 57, 30 + 52 +
59, 30 + 52 + 98, 30 + 52 + 100, 30 + 52 + 101, 30 + 52 + 102, 30 + 52 + 103, 30 + 52 +
106, 30 + 52 + 107, 30 + 53 + 57, 30 + 53 + 59, 30 + 53 + 98, 30 + 53 + 100, 30 + 53 +
101, 30 + 53 + 102, 30 + 53 + 103, 30 + 53 + 106, 30 + 53 + 107, 30 + 57 + 59, 30 + 57 +
98, 30 + 57 + 100, 30 + 57 + 101, 30 + 57 + 102, 30 + 57 + 103, 30 + 57 + 106, 30 + 57 +
107, 30 + 59 + 98, 30 + 59 + 100, 30 + 59 + 101, 30 + 59 + 102, 30 + 59 + 103, 30 + 59 +
106, 30 + 59 + 107, 30 + 98 + 100, 30 + 98 + 101, 30 + 98 + 102, 30 + 98 + 103, 30 + 98 +
106, 30 + 98 + 107, 30 + 100 + 101, 30 + 100 + 102, 30 + 100 + 103, 30 + 100 + 106, 30 +
100 + 107, 30 + 101 + 102, 30 + 101 + 103, 30 + 101 + 106, 30 + 101 + 107, 30 + 102 +
103, 30 + 102 + 106, 30 + 102 + 107, 30 + 103 + 106, 30 + 103 + 107, 30 + 106 + 107, 32 +
33 + 34, 32 + 33 + 50, 32 + 33 + 51, 32 + 33 + 52, 32 + 33 + 53, 32 + 33 + 57, 32 + 33 +
59, 32 + 33 + 98, 32 + 33 + 100, 32 + 33 + 101, 32 + 33 + 102, 32 + 33 + 103, 32 + 33 +
106, 32 + 33 + 107, 32 + 34 + 50, 32 + 34 + 51, 32 + 34 + 52, 32 + 34 + 53, 32 + 34 + 57,
32 + 34 + 59, 32 + 34 + 98, 32 + 34 + 100, 32 + 34 + 101, 32 + 34 + 102, 32 + 34 + 103,
32 + 34 + 106, 32 + 34 + 107, 32 + 50 + 51, 32 + 50 + 52, 32 + 50 + 53, 32 + 50 + 57, 32 +
50 + 59, 32 + 50 + 98, 32 + 50 + 100, 32 + 50 + 101, 32 + 50 + 102, 32 + 50 + 103, 32 +
50 + 106, 32 + 50 + 107, 32 + 51 + 52, 32 + 51 + 53, 32 + 51 + 57, 32 + 51 + 59, 32 + 51 +
98, 32 + 51 + 100, 32 + 51 + 101, 32 + 51 + 102, 32 + 51 + 103, 32 + 51 + 106, 32 + 51 +
107, 32 + 52 + 53, 32 + 52 + 57, 32 + 52 + 59, 32 + 52 + 98, 32 + 52 + 100, 32 + 52 + 101,
32 + 52 + 102, 32 + 52 + 103, 32 + 52 + 106, 32 + 52 + 107, 32 + 53 + 57, 32 + 53 + 59,
32 + 53 + 98, 32 + 53 + 100, 32 + 53 + 101, 32 + 53 + 102, 32 + 53 + 103, 32 + 53 + 106,
32 + 53 + 107, 32 + 57 + 59, 32 + 57 + 98, 32 + 57 + 100, 32 + 57 + 101, 32 + 57 + 102,
32 + 57 + 103, 32 + 57 + 106, 32 + 57 + 107, 32 + 59 + 98, 32 + 59 + 100, 32 + 59 + 101,
32 + 59 + 102, 32 + 59 + 103, 32 + 59 + 106, 32 + 59 + 107, 32 + 98 + 100, 32 + 98 + 101,
32 + 98 + 102, 32 + 98 + 103, 32 + 98 + 106, 32 + 98 + 107, 32 + 100 + 101, 32 + 100 +
102, 32 + 100 + 103, 32 + 100 + 106, 32 + 100 + 107, 32 + 101 + 102, 32 + 101 + 103, 32 +
101 + 106, 32 + 101 + 107, 32 + 102 + 103, 32 + 102 + 106, 32 + 102 + 107, 32 + 103 +
106, 32 + 103 + 107, 32 + 106 + 107, 33 + 34 + 50, 33 + 34 + 51, 33 + 34 + 52, 33 + 34 +
53, 33 + 34 + 57, 33 + 34 + 59, 33 + 34 + 98, 33 + 34 + 100, 33 + 34 + 101, 33 + 34 + 102,
33 + 34 + 103, 33 + 34 + 106, 33 + 34 + 107, 33 + 50 + 51, 33 + 50 + 52, 33 + 50 + 53, 33 +
50 + 57, 33 + 50 + 59, 33 + 50 + 98, 33 + 50 + 100, 33 + 50 + 101, 33 + 50 + 102, 33 +
50 + 103, 33 + 50 + 106, 33 + 50 + 107, 33 + 51 + 52, 33 + 51 + 53, 33 + 51 + 57, 33 + 51 +
59, 33 + 51 + 98, 33 + 51 + 100, 33 + 51 + 101, 33 + 51 + 102, 33 + 51 + 103, 33 + 51 +
106, 33 + 51 + 107, 33 + 52 + 53, 33 + 52 + 57, 33 + 52 + 59, 33 + 52 + 98, 33 + 52 + 100,
33 + 52 + 101, 33 + 52 + 102, 33 + 52 + 103, 33 + 52 + 106, 33 + 52 + 107, 33 + 53 + 57,
33 + 53 + 59, 33 + 53 + 98, 33 + 53 + 100, 33 + 53 + 101, 33 + 53 + 102, 33 + 53 + 103,
33 + 53 + 106, 33 + 53 + 107, 33 + 57 + 59, 33 + 57 + 98, 33 + 57 + 100, 33 + 57 + 101,
33 + 57 + 102, 33 + 57 + 103, 33 + 57 + 106, 33 + 57 + 107, 33 + 59 + 98, 33 + 59 + 100,
33 + 59 + 101, 33 + 59 + 102, 33 + 59 + 103, 33 + 59 + 106, 33 + 59 + 107, 33 + 98 + 100,
33 + 98 + 101, 33 + 98 + 102, 33 + 98 + 103, 33 + 98 + 106, 33 + 98 + 107, 33 + 100 +
101, 33 + 100 + 102, 33 + 100 + 103, 33 + 100 + 106, 33 + 100 + 107, 33 + 101 + 102, 33 +
101 + 103, 33 + 101 + 106, 33 + 101 + 107, 33 + 102 + 103, 33 + 102 + 106, 33 + 102 +
107, 33 + 103 + 106, 33 + 103 + 107, 33 + 106 + 107, 34 + 50 + 51, 34 + 50 + 52, 34 + 50 +
53, 34 + 50 + 57, 34 + 50 + 59, 34 + 50 + 98, 34 + 50 + 100, 34 + 50 + 101, 34 + 50 +
102, 34 + 50 + 103, 34 + 50 + 106, 34 + 50 + 107, 34 + 51 + 52, 34 + 51 + 53, 34 + 51 +
57, 34 + 51 + 59, 34 + 51 + 98, 34 + 51 + 100, 34 + 51 + 101, 34 + 51 + 102, 34 + 51 +
103, 34 + 51 + 106, 34 + 51 + 107, 34 + 52 + 53, 34 + 52 + 57, 34 + 52 + 59, 34 + 52 + 98,
34 + 52 + 100, 34 + 52 + 101, 34 + 52 + 102, 34 + 52 + 103, 34 + 52 + 106, 34 + 52 + 107,
34 + 53 + 57, 34 + 53 + 59, 34 + 53 + 98, 34 + 53 + 100, 34 + 53 + 101, 34 + 53 + 102, 34 +
53 + 103, 34 + 53 + 106, 34 + 53 + 107, 34 + 57 + 59, 34 + 57 + 98, 34 + 57 + 100, 34 +
57 + 101, 34 + 57 + 102, 34 + 57 + 103, 34 + 57 + 106, 34 + 57 + 107, 34 + 59 + 98, 34 +
59 + 100, 34 + 59 + 101, 34 + 59 + 102, 34 + 59 + 103, 34 + 59 + 106, 34 + 59 + 107, 34 +
98 + 100, 34 + 98 + 101, 34 + 98 + 102, 34 + 98 + 103, 34 + 98 + 106, 34 + 98 + 107, 34 +
100 + 101, 34 + 100 + 102, 34 + 100 + 103, 34 + 100 + 106, 34 + 100 + 107, 34 + 101 +
102, 34 + 101 + 103, 34 + 101 + 106, 34 + 101 + 107, 34 + 102 + 103, 34 + 102 + 106, 34 +
102 + 107, 34 + 103 + 106, 34 + 103 + 107, 34 + 106 + 107, 50 + 51 + 52, 50 + 51 + 53,
50 + 51 + 57, 50 + 51 + 59, 50 + 51 + 98, 50 + 51 + 100, 50 + 51 + 101, 50 + 51 + 102, 50 +
51 + 103, 50 + 51 + 106, 50 + 51 + 107, 50 + 52 + 53, 50 + 52 + 57, 50 + 52 + 59, 50 +
52 + 98, 50 + 52 + 100, 50 + 52 + 101, 50 + 52 + 102, 50 + 52 + 103, 50 + 52 + 106, 50 +
52 + 107, 50 + 53 + 57, 50 + 53 + 59, 50 + 53 + 98, 50 + 53 + 100, 50 + 53 + 101, 50 + 53 +
102, 50 + 53 + 103, 50 + 53 + 106, 50 + 53 + 107, 50 + 57 + 59, 50 + 57 + 98, 50 + 57 +
100, 50 + 57 + 101, 50 + 57 + 102, 50 + 57 + 103, 50 + 57 + 106, 50 + 57 + 107, 50 + 59 +
98, 50 + 59 + 100, 50 + 59 + 101, 50 + 59 + 102, 50 + 59 + 103, 50 + 59 + 106, 50 + 59 +
107, 50 + 98 + 100, 50 + 98 + 101, 50 + 98 + 102, 50 + 98 + 103, 50 + 98 + 106, 50 + 98 +
107, 50 + 100 + 101, 50 + 100 + 102, 50 + 100 + 103, 50 + 100 + 106, 50 + 100 + 107, 50 +
101 + 102, 50 + 101 + 103, 50 + 101 + 106, 50 + 101 + 107, 50 + 102 + 103, 50 + 102 +
106, 50 + 102 + 107, 50 + 103 + 106, 50 + 103 + 107, 50 + 106 + 107, 51 + 52 + 53, 51 +
52 + 57, 51 + 52 + 59, 51 + 52 + 98, 51 + 52 + 100, 51 + 52 + 101, 51 + 52 + 102, 51 + 52 +
103, 51 + 52 + 106, 51 + 52 + 107, 51 + 53 + 57, 51 + 53 + 59, 51 + 53 + 98, 51 + 53 +
100, 51 + 53 + 101, 51 + 53 + 102, 51 + 53 + 103, 51 + 53 + 106, 51 + 53 + 107, 51 + 57 +
59, 51 + 57 + 98, 51 + 57 + 100, 51 + 57 + 101, 51 + 57 + 102, 51 + 57 + 103, 51 + 57 +
106, 51 + 57 + 107, 51 + 59 + 98, 51 + 59 + 100, 51 + 59 + 101, 51 + 59 + 102, 51 + 59 +
103, 51 + 59 + 106, 51 + 59 + 107, 51 + 98 + 100, 51 + 98 + 101, 51 + 98 + 102, 51 + 98 +
103, 51 + 98 + 106, 51 + 98 + 107, 51 + 100 + 101, 51 + 100 + 102, 51 + 100 + 103, 51 +
100 + 106, 51 + 100 + 107, 51 + 101 + 102, 51 + 101 + 103, 51 + 101 + 106, 51 + 101 +
107, 51 + 102 + 103, 51 + 102 + 106, 51 + 102 + 107, 51 + 103 + 106, 51 + 103 + 107, 51 +
106 + 107, 52 + 53 + 57, 52 + 53 + 59, 52 + 53 + 98, 52 + 53 + 100, 52 + 53 + 101, 52 +
53 + 102, 52 + 53 + 103, 52 + 53 + 106, 52 + 53 + 107, 52 + 57 + 59, 52 + 57 + 98, 52 +
57 + 100, 52 + 57 + 101, 52 + 57 + 102, 52 + 57 + 103, 52 + 57 + 106, 52 + 57 + 107, 52 +
59 + 98, 52 + 59 + 100, 52 + 59 + 101, 52 + 59 + 102, 52 + 59 + 103, 52 + 59 + 106, 52 +
59 + 107, 52 + 98 + 100, 52 + 98 + 101, 52 + 98 + 102, 52 + 98 + 103, 52 + 98 + 106, 52 +
98 + 107, 52 + 100 + 101, 52 + 100 + 102, 52 + 100 + 103, 52 + 100 + 106, 52 + 100 +
107, 52 + 101 + 102, 52 + 101 + 103, 52 + 101 + 106, 52 + 101 + 107, 52 + 102 + 103, 52 +
102 + 106, 52 + 102 + 107, 52 + 103 + 106, 52 + 103 + 107, 52 + 106 + 107, 53 + 57 +
59, 53 + 57 + 98, 53 + 57 + 100, 53 + 57 + 101, 53 + 57 + 102, 53 + 57 + 103, 53 + 57 +
106, 53 + 57 + 107, 53 + 59 + 98, 53 + 59 + 100, 53 + 59 + 101, 53 + 59 + 102, 53 + 59 +
103, 53 + 59 + 106, 53 + 59 + 107, 53 + 98 + 100, 53 + 98 + 101, 53 + 98 + 102, 53 + 98 +
103, 53 + 98 + 106, 53 + 98 + 107, 53 + 100 + 101, 53 + 100 + 102, 53 + 100 + 103, 53 +
100 + 106, 53 + 100 + 107, 53 + 101 + 102, 53 + 101 + 103, 53 + 101 + 106, 53 + 101 +
107, 53 + 102 + 103, 53 + 102 + 106, 53 + 102 + 107, 53 + 103 + 106, 53 + 103 + 107, 53 +
106 + 107, 57 + 59 + 98, 57 + 59 + 100, 57 + 59 + 101, 57 + 59 + 102, 57 + 59 + 103, 57 +
59 + 106, 57 + 59 + 107, 57 + 98 + 100, 57 + 98 + 101, 57 + 98 + 102, 57 + 98 + 103, 57 +
98 + 106, 57 + 98 + 107, 57 + 100 + 101, 57 + 100 + 102, 57 + 100 + 103, 57 + 100 +
106, 57 + 100 + 107, 57 + 101 + 102, 57 + 101 + 103, 57 + 101 + 106, 57 + 101 + 107, 57 +
102 + 103, 57 + 102 + 106, 57 + 102 + 107, 57 + 103 + 106, 57 + 103 + 107, 57 + 106 +
107, 59 + 98 + 100, 59 + 98 + 101, 59 + 98 + 102, 59 + 98 + 103, 59 + 98 + 106, 59 + 98 +
107, 59 + 100 + 101, 59 + 100 + 102, 59 + 100 + 103, 59 + 100 + 106, 59 + 100 + 107, 59 +
101 + 102, 59 + 101 + 103, 59 + 101 + 106, 59 + 101 + 107, 59 + 102 + 103, 59 + 102 +
106, 59 + 102 + 107, 59 + 103 + 106, 59 + 103 + 107, 59 + 106 + 107, 98 + 100 + 101, 98 +
100 + 102, 98 + 100 + 103, 98 + 100 + 106, 98 + 100 + 107, 98 + 101 + 102, 98 + 101 +
103, 98 + 101 + 106, 98 + 101 + 107, 98 + 102 + 103, 98 + 102 + 106, 98 + 102 + 107, 98 +
103 + 106, 98 + 103 + 107, 98 + 106 + 107, 100 + 101 + 102, 100 + 101 + 103, 100 +
101 + 106, 100 + 101 + 107, 100 + 102 + 103, 100 + 102 + 106, 100 + 102 + 107, 100 +
103 + 106, 100 + 103 + 107, 100 + 106 + 107, 101 + 102 + 103, 101 + 102 + 106, 101 +
102 + 107, 101 + 103 + 106, 101 + 103 + 107, 101 + 106 + 107, 102 + 103 + 106, 102 +
103 + 107, 102 + 106 + 107, 103 + 106 + 107

[0574] In some examples of any of the ABPCs described herein, a light chain variable domain includes a light chain variable domain that is at least 90% (e.g., at least 92%, at least 94%, at least 96%, at least 98%, at least 99%, or 100%) identical to SEQ ID NO: 503, where the light chain variable domain includes a histidine at any of the specific combinations of one or more amino acid positions in SEQ ID NO: 503 listed in Table 8.

TABLE 8
Exemplary Combinations of Amino Acid Positions in SEQ
ID NO: 503 that can be Substituted with Histidine

25 + 29, 25 + 31, 25 + 32, 25 + 33, 25 + 34, 25 + 35, 25 + 52, 25 + 55, 25 + 91, 25 + 92, 25 +
93, 25 + 94, 25 + 95, 25 + 96, 25 + 97, 25 + 98, 29 + 31, 29 + 32, 29 + 33, 29 + 34, 29 +
35, 29 + 52, 29 + 55, 29 + 91, 29 + 92, 29 + 93, 29 + 94, 29 + 95, 29 + 96, 29 + 97, 29 +
98, 31 + 32, 31 + 33, 31 + 34, 31 + 35, 31 + 52, 31 + 55, 31 + 91, 31 + 92, 31 + 93, 31 +
94, 31 + 95, 31 + 96, 31 + 97, 31 + 98, 32 + 33, 32 + 34, 32 + 35, 32 + 52, 32 + 55, 32 +
91, 32 + 92, 32 + 93, 32 + 94, 32 + 95, 32 + 96, 32 + 97, 32 + 98, 33 + 34, 33 + 35, 33 +
52, 33 + 55, 33 + 91, 33 + 92, 33 + 93, 33 + 94, 33 + 95, 33 + 96, 33 + 97, 33 + 98, 34 +
35, 34 + 52, 34 + 55, 34 + 91, 34 + 92, 34 + 93, 34 + 94, 34 + 95, 34 + 96, 34 + 97, 34 +
98, 35 + 52, 35 + 55, 35 + 91, 35 + 92, 35 + 93, 35 + 94, 35 + 95, 35 + 96, 35 + 97, 35 +
98, 52 + 55, 52 + 91, 52 + 92, 52 + 93, 52 + 94, 52 + 95, 52 + 96, 52 + 97, 52 + 98, 55 +
91, 55 + 92, 55 + 93, 55 + 94, 55 + 95, 55 + 96, 55 + 97, 55 + 98, 91 + 92, 91 + 93, 91 +
94, 91 + 95, 91 + 96, 91 + 97, 91 + 98, 92 + 93, 92 + 94, 92 + 95, 92 + 96, 92 + 97, 92 +
98, 93 + 94, 93 + 95, 93 + 96, 93 + 97, 93 + 98, 94 + 95, 94 + 96, 94 + 97, 94 + 98, 95 +
96, 95 + 97, 95 + 98, 96 + 97, 96 + 98, 97 + 98, 25 + 29 + 31, 25 + 29 + 32, 25 + 29 + 33,
25 + 29 + 34, 25 + 29 + 35, 25 + 29 + 52, 25 + 29 + 55, 25 + 29 + 91, 25 + 29 + 92, 25 +
29 + 93, 25 + 29 + 94, 25 + 29 + 95, 25 + 29 + 96, 25 + 29 + 97, 25 + 29 + 98, 25 + 31 +
32, 25 + 31 + 33, 25 + 31 + 34, 25 + 31 + 35, 25 + 31 + 52, 25 + 31 + 55, 25 + 31 + 91, 25 +
31 + 92, 25 + 31 + 93, 25 + 31 + 94, 25 + 31 + 95, 25 + 31 + 96, 25 + 31 + 97, 25 + 31 +
98, 25 + 32 + 33, 25 + 32 + 34, 25 + 32 + 35, 25 + 32 + 52, 25 + 32 + 55, 25 + 32 + 91, 25 +
32 + 92, 25 + 32 + 93, 25 + 32 + 94, 25 + 32 + 95, 25 + 32 + 96, 25 + 32 + 97, 25 + 32 +
98, 25 + 33 + 34, 25 + 33 + 35, 25 + 33 + 52, 25 + 33 + 55, 25 + 33 + 91, 25 + 33 + 92, 25 +
33 + 93, 25 + 33 + 94, 25 + 33 + 95, 25 + 33 + 96, 25 + 33 + 97, 25 + 33 + 98, 25 + 34 +
35, 25 + 34 + 52, 25 + 34 + 55, 25 + 34 + 91, 25 + 34 + 92, 25 + 34 + 93, 25 + 34 + 94, 25 +
34 + 95, 25 + 34 + 96, 25 + 34 + 97, 25 + 34 + 98, 25 + 35 + 52, 25 + 35 + 55, 25 + 35 +
91, 25 + 35 + 92, 25 + 35 + 93, 25 + 35 + 94, 25 + 35 + 95, 25 + 35 + 96, 25 + 35 + 97, 25 +
35 + 98, 25 + 52 + 55, 25 + 52 + 91, 25 + 52 + 92, 25 + 52 + 93, 25 + 52 + 94, 25 + 52 +
95, 25 + 52 + 96, 25 + 52 + 97, 25 + 52 + 98, 25 + 55 + 91, 25 + 55 + 92, 25 + 55 + 93, 25 +
55 + 94, 25 + 55 + 95, 25 + 55 + 96, 25 + 55 + 97, 25 + 55 + 98, 25 + 91 + 92, 25 + 91 +
93, 25 + 91 + 94, 25 + 91 + 95, 25 + 91 + 96, 25 + 91 + 97, 25 + 91 + 98, 25 + 92 + 93, 25 +
92 + 94, 25 + 92 + 95, 25 + 92 + 96, 25 + 92 + 97, 25 + 92 + 98, 25 + 93 + 94, 25 + 93 +
95, 25 + 93 + 96, 25 + 93 + 97, 25 + 93 + 98, 25 + 94 + 95, 25 + 94 + 96, 25 + 94 + 97, 25 +
94 + 98, 25 + 95 + 96, 25 + 95 + 97, 25 + 95 + 98, 25 + 96 + 97, 25 + 96 + 98, 25 + 97 +
98, 29 + 31 + 32, 29 + 31 + 33, 29 + 31 + 34, 29 + 31 + 35, 29 + 31 + 52, 29 + 31 + 55, 29 +
31 + 91, 29 + 31 + 92, 29 + 31 + 93, 29 + 31 + 94, 29 + 31 + 95, 29 + 31 + 96, 29 + 31 +
97, 29 + 31 + 98, 29 + 32 + 33, 29 + 32 + 34, 29 + 32 + 35, 29 + 32 + 52, 29 + 32 + 55, 29 +
32 + 91, 29 + 32 + 92, 29 + 32 + 93, 29 + 32 + 94, 29 + 32 + 95, 29 + 32 + 96, 29 + 32 +
97, 29 + 32 + 98, 29 + 33 + 34, 29 + 33 + 35, 29 + 33 + 52, 29 + 33 + 55, 29 + 33 + 91, 29 +
33 + 92, 29 + 33 + 93, 29 + 33 + 94, 29 + 33 + 95, 29 + 33 + 96, 29 + 33 + 97, 29 + 33 +
98, 29 + 34 + 35, 29 + 34 + 52, 29 + 34 + 55, 29 + 34 + 91, 29 + 34 + 92, 29 + 34 + 93, 29 +
34 + 94, 29 + 34 + 95, 29 + 34 + 96, 29 + 34 + 97, 29 + 34 + 98, 29 + 35 + 52, 29 + 35 +
55, 29 + 35 + 91, 29 + 35 + 92, 29 + 35 + 93, 29 + 35 + 94, 29 + 35 + 95, 29 + 35 + 96, 29 +
35 + 97, 29 + 35 + 98, 29 + 52 + 55, 29 + 52 + 91, 29 + 52 + 92, 29 + 52 + 93, 29 + 52 +
94, 29 + 52 + 95, 29 + 52 + 96, 29 + 52 + 97, 29 + 52 + 98, 29 + 55 + 91, 29 + 55 + 92, 29 +
55 + 93, 29 + 55 + 94, 29 + 55 + 95, 29 + 55 + 96, 29 + 55 + 97, 29 + 55 + 98, 29 + 91 +
92, 29 + 91 + 93, 29 + 91 + 94, 29 + 91 + 95, 29 + 91 + 96, 29 + 91 + 97, 29 + 91 + 98, 29 +
92 + 93, 29 + 92 + 94, 29 + 92 + 95, 29 + 92 + 96, 29 + 92 + 97, 29 + 92 + 98, 29 + 93 +
94, 29 + 93 + 95, 29 + 93 + 96, 29 + 93 + 97, 29 + 93 + 98, 29 + 94 + 95, 29 + 94 + 96, 29 +
94 + 97, 29 + 94 + 98, 29 + 95 + 96, 29 + 95 + 97, 29 + 95 + 98, 29 + 96 + 97, 29 + 96 +
98, 29 + 97 + 98, 31 + 32 + 33, 31 + 32 + 34, 31 + 32 + 35, 31 + 32 + 52, 31 + 32 + 55, 31 +
32 + 91, 31 + 32 + 92, 31 + 32 + 93, 31 + 32 + 94, 31 + 32 + 95, 31 + 32 + 96, 31 + 32 +
97, 31 + 32 + 98, 31 + 33 + 34, 31 + 33 + 35, 31 + 33 + 52, 31 + 33 + 55, 31 + 33 + 91, 31 +
33 + 92, 31 + 33 + 93, 31 + 33 + 94, 31 + 33 + 95, 31 + 33 + 96, 31 + 33 + 97, 31 + 33 +
98, 31 + 34 + 35, 31 + 34 + 52, 31 + 34 + 55, 31 + 34 + 91, 31 + 34 + 92, 31 + 34 + 93, 31 +
34 + 94, 31 + 34 + 95, 31 + 34 + 96, 31 + 34 + 97, 31 + 34 + 98, 31 + 35 + 52, 31 + 35 +
55, 31 + 35 + 91, 31 + 35 + 92, 31 + 35 + 93, 31 + 35 + 94, 31 + 35 + 95, 31 + 35 + 96, 31 +
35 + 97, 31 + 35 + 98, 31 + 52 + 55, 31 + 52 + 91, 31 + 52 + 92, 31 + 52 + 93, 31 + 52 +
94, 31 + 52 + 95, 31 + 52 + 96, 31 + 52 + 97, 31 + 52 + 98, 31 + 55 + 91, 31 + 55 + 92, 31 +
55 + 93, 31 + 55 + 94, 31 + 55 + 95, 31 + 55 + 96, 31 + 55 + 97, 31 + 55 + 98, 31 + 91 +
92, 31 + 91 + 93, 31 + 91 + 94, 31 + 91 + 95, 31 + 91 + 96, 31 + 91 + 97, 31 + 91 + 98, 31 +
92 + 93, 31 + 92 + 94, 31 + 92 + 95, 31 + 92 + 96, 31 + 92 + 97, 31 + 92 + 98, 31 + 93 +
94, 31 + 93 + 95, 31 + 93 + 96, 31 + 93 + 97, 31 + 93 + 98, 31 + 94 + 95, 31 + 94 + 96, 31 +
94 + 97, 31 + 94 + 98, 31 + 95 + 96, 31 + 95 + 97, 31 + 95 + 98, 31 + 96 + 97, 31 + 96 +
98, 31 + 97 + 98, 32 + 33 + 34, 32 + 33 + 35, 32 + 33 + 52, 32 + 33 + 55, 32 + 33 + 91, 32 +
33 + 92, 32 + 33 + 93, 32 + 33 + 94, 32 + 33 + 95, 32 + 33 + 96, 32 + 33 + 97, 32 + 33 +
98, 32 + 34 + 35, 32 + 34 + 52, 32 + 34 + 55, 32 + 34 + 91, 32 + 34 + 92, 32 + 34 + 93, 32 +
34 + 94, 32 + 34 + 95, 32 + 34 + 96, 32 + 34 + 97, 32 + 34 + 98, 32 + 35 + 52, 32 + 35 +
55, 32 + 35 + 91, 32 + 35 + 92, 32 + 35 + 93, 32 + 35 + 94, 32 + 35 + 95, 32 + 35 + 96, 32 +
35 + 97, 32 + 35 + 98, 32 + 52 + 55, 32 + 52 + 91, 32 + 52 + 92, 32 + 52 + 93, 32 + 52 +
94, 32 + 52 + 95, 32 + 52 + 96, 32 + 52 + 97, 32 + 52 + 98, 32 + 55 + 91, 32 + 55 + 92, 32 +
55 + 93, 32 + 55 + 94, 32 + 55 + 95, 32 + 55 + 96, 32 + 55 + 97, 32 + 55 + 98, 32 + 91 +
92, 32 + 91 + 93, 32 + 91 + 94, 32 + 91 + 95, 32 + 91 + 96, 32 + 91 + 97, 32 + 91 + 98, 32 +
92 + 93, 32 + 92 + 94, 32 + 92 + 95, 32 + 92 + 96, 32 + 92 + 97, 32 + 92 + 98, 32 + 93 +
94, 32 + 93 + 95, 32 + 93 + 96, 32 + 93 + 97, 32 + 93 + 98, 32 + 94 + 95, 32 + 94 + 96, 32 +
94 + 97, 32 + 94 + 98, 32 + 95 + 96, 32 + 95 + 97, 32 + 95 + 98, 32 + 96 + 97, 32 + 96 +
98, 32 + 97 + 98, 33 + 34 + 35, 33 + 34 + 52, 33 + 34 + 55, 33 + 34 + 91, 33 + 34 + 92, 33 +
34 + 93, 33 + 34 + 94, 33 + 34 + 95, 33 + 34 + 96, 33 + 34 + 97, 33 + 34 + 98, 33 + 35 +
52, 33 + 35 + 55, 33 + 35 + 91, 33 + 35 + 92, 33 + 35 + 93, 33 + 35 + 94, 33 + 35 + 95, 33 +
35 + 96, 33 + 35 + 97, 33 + 35 + 98, 33 + 52 + 55, 33 + 52 + 91, 33 + 52 + 92, 33 + 52 +
93, 33 + 52 + 94, 33 + 52 + 95, 33 + 52 + 96, 33 + 52 + 97, 33 + 52 + 98, 33 + 55 + 91, 33 +
55 + 92, 33 + 55 + 93, 33 + 55 + 94, 33 + 55 + 95, 33 + 55 + 96, 33 + 55 + 97, 33 + 55 +
98, 33 + 91 + 92, 33 + 91 + 93, 33 + 91 + 94, 33 + 91 + 95, 33 + 91 + 96, 33 + 91 + 97, 33 +
91 + 98, 33 + 92 + 93, 33 + 92 + 94, 33 + 92 + 95, 33 + 92 + 96, 33 + 92 + 97, 33 + 92 +
98, 33 + 93 + 94, 33 + 93 + 95, 33 + 93 + 96, 33 + 93 + 97, 33 + 93 + 98, 33 + 94 + 95, 33 +
94 + 96, 33 + 94 + 97, 33 + 94 + 98, 33 + 95 + 96, 33 + 95 + 97, 33 + 95 + 98, 33 + 96 +
97, 33 + 96 + 98, 33 + 97 + 98, 34 + 35 + 52, 34 + 35 + 55, 34 + 35 + 91, 34 + 35 + 92, 34 +
35 + 93, 34 + 35 + 94, 34 + 35 + 95, 34 + 35 + 96, 34 + 35 + 97, 34 + 35 + 98, 34 + 52 +
55, 34 + 52 + 91, 34 + 52 + 92, 34 + 52 + 93, 34 + 52 + 94, 34 + 52 + 95, 34 + 52 + 96, 34 +
52 + 97, 34 + 52 + 98, 34 + 55 + 91, 34 + 55 + 92, 34 + 55 + 93, 34 + 55 + 94, 34 + 55 +
95, 34 + 55 + 96, 34 + 55 + 97, 34 + 55 + 98, 34 + 91 + 92, 34 + 91 + 93, 34 + 91 + 94, 34 +
91 + 95, 34 + 91 + 96, 34 + 91 + 97, 34 + 91 + 98, 34 + 92 + 93, 34 + 92 + 94, 34 + 92 +
95, 34 + 92 + 96, 34 + 92 + 97, 34 + 92 + 98, 34 + 93 + 94, 34 + 93 + 95, 34 + 93 + 96, 34 +
93 + 97, 34 + 93 + 98, 34 + 94 + 95, 34 + 94 + 96, 34 + 94 + 97, 34 + 94 + 98, 34 + 95 +
96, 34 + 95 + 97, 34 + 95 + 98, 34 + 96 + 97, 34 + 96 + 98, 34 + 97 + 98, 35 + 52 + 55, 35 +
52 + 91, 35 + 52 + 92, 35 + 52 + 93, 35 + 52 + 94, 35 + 52 + 95, 35 + 52 + 96, 35 + 52 +
97, 35 + 52 + 98, 35 + 55 + 91, 35 + 55 + 92, 35 + 55 + 93, 35 + 55 + 94, 35 + 55 + 95, 35 +
55 + 96, 35 + 55 + 97, 35 + 55 + 98, 35 + 91 + 92, 35 + 91 + 93, 35 + 91 + 94, 35 + 91 +
95, 35 + 91 + 96, 35 + 91 + 97, 35 + 91 + 98, 35 + 92 + 93, 35 + 92 + 94, 35 + 92 + 95, 35 +
92 + 96, 35 + 92 + 97, 35 + 92 + 98, 35 + 93 + 94, 35 + 93 + 95, 35 + 93 + 96, 35 + 93 +
97, 35 + 93 + 98, 35 + 94 + 95, 35 + 94 + 96, 35 + 94 + 97, 35 + 94 + 98, 35 + 95 + 96, 35 +
95 + 97, 35 + 95 + 98, 35 + 96 + 97, 35 + 96 + 98, 35 + 97 + 98, 52 + 55 + 91, 52 + 55 +
92, 52 + 55 + 93, 52 + 55 + 94, 52 + 55 + 95, 52 + 55 + 96, 52 + 55 + 97, 52 + 55 + 98, 52 +
91 + 92, 52 + 91 + 93, 52 + 91 + 94, 52 + 91 + 95, 52 + 91 + 96, 52 + 91 + 97, 52 + 91 +
98, 52 + 92 + 93, 52 + 92 + 94, 52 + 92 + 95, 52 + 92 + 96, 52 + 92 + 97, 52 + 92 + 98, 52 +
93 + 94, 52 + 93 + 95, 52 + 93 + 96, 52 + 93 + 97, 52 + 93 + 98, 52 + 94 + 95, 52 + 94 +
96, 52 + 94 + 97, 52 + 94 + 98, 52 + 95 + 96, 52 + 95 + 97, 52 + 95 + 98, 52 + 96 + 97, 52 +
96 + 98, 52 + 97 + 98, 55 + 91 + 92, 55 + 91 + 93, 55 + 91 + 94, 55 + 91 + 95, 55 + 91 +
96, 55 + 91 + 97, 55 + 91 + 98, 55 + 92 + 93, 55 + 92 + 94, 55 + 92 + 95, 55 + 92 + 96, 55 +
92 + 97, 55 + 92 + 98, 55 + 93 + 94, 55 + 93 + 95, 55 + 93 + 96, 55 + 93 + 97, 55 + 93 +
98, 55 + 94 + 95, 55 + 94 + 96, 55 + 94 + 97, 55 + 94 + 98, 55 + 95 + 96, 55 + 95 + 97, 55 +
95 + 98, 55 + 96 + 97, 55 + 96 + 98, 55 + 97 + 98, 91 + 92 + 93, 91 + 92 + 94, 91 + 92 +
95, 91 + 92 + 96, 91 + 92 + 97, 91 + 92 + 98, 91 + 93 + 94, 91 + 93 + 95, 91 + 93 + 96, 91 +
93 + 97, 91 + 93 + 98, 91 + 94 + 95, 91 + 94 + 96, 91 + 94 + 97, 91 + 94 + 98, 91 + 95 +
96, 91 + 95 + 97, 91 + 95 + 98, 91 + 96 + 97, 91 + 96 + 98, 91 + 97 + 98, 92 + 93 + 94, 92 +
93 + 95, 92 + 93 + 96, 92 + 93 + 97, 92 + 93 + 98, 92 + 94 + 95, 92 + 94 + 96, 92 + 94 +
97, 92 + 94 + 98, 92 + 95 + 96, 92 + 95 + 97, 92 + 95 + 98, 92 + 96 + 97, 92 + 96 + 98, 92 +
97 + 98, 93 + 94 + 95, 93 + 94 + 96, 93 + 94 + 97, 93 + 94 + 98, 93 + 95 + 96, 93 + 95 +
97, 93 + 95 + 98, 93 + 96 + 97, 93 + 96 + 98, 93 + 97 + 98, 94 + 95 + 96, 94 + 95 + 97, 94 +
95 + 98, 94 + 96 + 97, 94 + 96 + 98, 94 + 97 + 98, 95 + 96 + 97, 95 + 96 + 98, 95 + 97 +
98, 96 + 97 + 98

[0575] In some examples of any of the ABPCs described herein, the first antigen-binding domain includes a heavy chain variable domain that is at least 90% (e.g., at least 92%, at least 94%, at least 96%, at least 98%, at least 99%, or 100%) identical to SEQ ID NO: 502, where the heavy chain variable domain includes a histidine at any of the specific combinations of one or more amino acid positions in SEQ ID NO: 502 listed in Table 7; and a light chain variable domain that that is at least 90% (e.g., at least 92%, at least 94%, at least 96%, at least 98%, at least 99%, or 100%) identical to SEQ ID NO: 503, where the light chain variable domain includes a histidine at any of the specific combinations of one or more amino acid positions in SEQ ID NO: 503 listed in Table 8.

[0576] In some examples of any of the ABPCs described herein, the first antigen-binding domain comprises a light chain variable domain comprising SEQ ID NO: 503, and a heavy chain variable domain that is at least 90% identical (e.g., at least 92%, at least 94%, at least 96%, at least 98%, at least 99%, or 100%) identical to SEQ ID NO: 502, where the heavy chain variable domain includes a histidine at any of the specific combinations of one or more (e.g., two, three, four, five, six, seven, eight, nine, or ten) amino acid positions in SEQ ID NO: 502 listed in Table 7.

[0577] In some examples of any of the ABPCs described herein, the first antigen-binding domain comprises a light chain variable domain that is at least 90% identical to SEQ ID NO: 503, wherein the light chain variable domain includes a histidine at position 25 in SEQ ID NO: 503; and a heavy chain variable domain that is at least 90% (e.g., at least 92%, at least 94%, at least 96%, at least 98%, at least 99%, or 100%) identical to SEQ ID NO: 502, where the heavy chain variable domain includes a histidine at any of the specific combinations of one or more amino acid positions in SEQ ID NO: 502 listed in Table 7.

[0578] In some examples of any of the ABPCs described herein, the first antigen-binding domain comprises a light chain variable domain that is at least 90% identical to SEQ ID NO: 503, wherein the light chain variable domain includes a histidine at position 29 in SEQ ID NO: 503; and a heavy chain variable domain that is at least 90% (e.g., at least 92%, at least 94%, at least 96%, at least 98%, at least 99%, or 100%) identical to SEQ ID NO: 502, where the heavy chain variable domain includes a histidine at any of the specific combinations of one or more amino acid positions in SEQ ID NO: 502 listed in Table 7.

[0579] In some examples of any of the ABPCs described herein, the first antigen-binding domain comprises a light chain variable domain that is at least 90% identical to SEQ ID NO: 503, wherein the light chain variable domain includes a histidine at position 31 in SEQ ID NO: 503; and a heavy chain variable domain that is at least 90% (e.g., at least 92%, at least 94%, at least 96%, at least 98%, at least 99%, or 100%) identical to SEQ ID NO: 502, where the heavy chain variable domain includes a histidine at any of the specific combinations of one or more amino acid positions in SEQ ID NO: 502 listed in Table 7.

[0580] In some examples of any of the ABPCs described herein, the first antigen-binding domain comprises a light chain variable domain that is at least 90% identical to SEQ ID NO: 503, wherein the light chain variable domain includes a histidine at position 32 in SEQ ID NO: 503; and a heavy chain variable domain that is at least 90% (e.g., at least 92%, at least 94%, at least 96%, at least 98%, at least 99%, or 100%) identical to SEQ ID NO: 502, where the heavy chain variable domain includes a histidine at any of the specific combinations of one or more amino acid positions in SEQ ID NO: 502 listed in Table 7.

[0581] In some examples of any of the ABPCs described herein, the first antigen-binding domain comprises a light chain variable domain that is at least 90% identical to SEQ ID NO: 503, wherein the light chain variable domain includes a histidine at position 33 in SEQ ID NO: 503; and a heavy chain variable domain that is at least 90% (e.g., at least 92%, at least 94%, at least 96%, at least 98%, at least 99%, or 100%) identical to SEQ ID NO: 502, where the heavy chain variable domain includes a histidine at any of the specific combinations of one or more amino acid positions in SEQ ID NO: 502 listed in Table 7.

[0582] In some examples of any of the ABPCs described herein, the first antigen-binding domain comprises a light chain variable domain that is at least 90% identical to SEQ ID NO: 503, wherein the light chain variable domain includes a histidine at position 34 in SEQ ID NO: 503; and a heavy chain variable domain that is at least 90% (e.g., at least 92%, at least 94%, at least 96%, at least 98%, at least 99%, or 100%) identical to SEQ ID NO: 502, where the heavy chain variable domain includes a histidine at any of the specific combinations of one or more amino acid positions in SEQ ID NO: 502 listed in Table 7.

[0583] In some examples of any of the ABPCs described herein, the first antigen-binding domain comprises a light chain variable domain that is at least 90% identical to SEQ ID NO: 503, wherein the light chain variable domain includes a histidine at position 35 in SEQ ID NO: 503; and a heavy chain variable domain that is at least 90% (e.g., at least 92%, at least 94%, at least 96%, at least 98%, at least 99%, or 100%) identical to SEQ ID NO: 502, where the heavy chain variable domain includes a histidine at any of the specific combinations of one or more amino acid positions in SEQ ID NO: 502 listed in Table 7.

[0584] In some examples of any of the ABPCs described herein, the first antigen-binding domain comprises a light chain variable domain that is at least 90% identical to SEQ ID NO: 503, wherein the light chain variable domain includes a histidine at position 52 in SEQ ID NO: 503; and a heavy chain variable domain that is at least 90% (e.g., at least 92%, at least 94%, at least 96%, at least 98%, at least 99%, or 100%) identical to SEQ ID NO: 502, where the heavy chain variable domain includes a histidine at any of the specific combinations of one or more amino acid positions in SEQ ID NO: 502 listed in Table 7.

[0585] In some examples of any of the ABPCs described herein, the first antigen-binding domain comprises a light chain variable domain that is at least 90% identical to SEQ ID NO: 503, wherein the light chain variable domain includes a histidine at position 55 in SEQ ID NO: 503; and a heavy chain variable domain that is at least 90% (e.g., at least 92%, at least 94%, at least 96%, at least 98%, at least 99%, or 100%) identical to SEQ ID NO: 502, where the heavy chain variable domain includes a histidine at any of the specific combinations of one or more amino acid positions in SEQ ID NO: 502 listed in Table 7.

[0586] In some examples of any of the ABPCs described herein, the first antigen-binding domain comprises a light chain variable domain that is at least 90% identical to SEQ ID NO: 503, wherein the light chain variable domain includes a histidine at position 91 in SEQ ID NO: 503; and a heavy chain variable domain that is at least 90% (e.g., at least 92%, at least 94%, at least 96%, at least 98%, at least 99%, or 100%) identical to SEQ ID NO: 502, where the heavy chain variable domain includes a histidine at any of the specific combinations of one or more amino acid positions in SEQ ID NO: 502 listed in Table 7.

[0587] In some examples of any of the ABPCs described herein, the first antigen-binding domain comprises a light chain variable domain that is at least 90% identical to SEQ ID NO: 503, wherein the light chain variable domain includes a histidine at position 92 in SEQ ID NO: 503; and a heavy chain variable domain that is at least 90% (e.g., at least 92%, at least 94%, at least 96%, at least 98%, at least 99%, or 100%) identical to SEQ ID NO: 502, where the heavy chain variable domain includes a histidine at any of the specific combinations of one or more amino acid positions in SEQ ID NO: 502 listed in Table 7.

[0588] In some examples of any of the ABPCs described herein, the first antigen-binding domain comprises a light chain variable domain that is at least 90% identical to SEQ ID NO: 503, wherein the light chain variable domain includes a histidine at position 93 in SEQ ID NO: 503; and a heavy chain variable domain that is at least 90% (e.g., at least 92%, at least 94%, at least 96%, at least 98%, at least 99%, or 100%) identical to SEQ ID NO: 502, where the heavy chain variable domain includes a histidine at any of the specific combinations of one or more amino acid positions in SEQ ID NO: 502 listed in Table 7.

[0589] In some examples of any of the ABPCs described herein, the first antigen-binding domain comprises a light chain variable domain that is at least 90% identical to SEQ ID NO: 503, wherein the light chain variable domain includes a histidine at position 94 in SEQ ID NO: 503; and a heavy chain variable domain that is at least 90% (e.g., at least 92%, at least 94%, at least 96%, at least 98%, at least 99%, or 100%) identical to SEQ ID NO: 502, where the heavy chain variable domain includes a histidine at any of the specific combinations of one or more amino acid positions in SEQ ID NO: 502 listed in Table 7.

[0590] In some examples of any of the ABPCs described herein, the first antigen-binding domain comprises a light chain variable domain that is at least 90% identical to SEQ ID NO: 503, wherein the light chain variable domain includes a histidine at position 95 in SEQ ID NO: 503; and a heavy chain variable domain that is at least 90% (e.g., at least 92%, at least 94%, at least 96%, at least 98%, at least 99%, or 100%) identical to SEQ ID NO: 502, where the heavy chain variable domain includes a histidine at any of the specific combinations of one or more amino acid positions in SEQ ID NO: 502 listed in Table 7.

[0591] In some examples of any of the ABPCs described herein, the first antigen-binding domain comprises a light chain variable domain that is at least 90% identical to SEQ ID NO: 503, wherein the light chain variable domain includes a histidine at position 96 in SEQ ID NO: 503; and a heavy chain variable domain that is at least 90% (e.g., at least 92%, at least 94%, at least 96%, at least 98%, at least 99%, or 100%) identical to SEQ ID NO: 502, where the heavy chain variable domain includes a histidine at any of the specific combinations of one or more amino acid positions in SEQ ID NO: 502 listed in Table 7.

[0592] In some examples of any of the ABPCs described herein, the first antigen-binding domain comprises a light chain variable domain that is at least 90% identical to SEQ ID NO: 503, wherein the light chain variable domain includes a histidine at position 97 in SEQ ID NO: 503; and a heavy chain variable domain that is at least 90% (e.g., at least 92%, at least 94%, at least 96%, at least 98%, at least 99%, or 100%) identical to SEQ ID NO: 502, where the heavy chain variable domain includes a histidine at any of the specific combinations of one or more amino acid positions in SEQ ID NO: 502 listed in Table 7.

[0593] In some examples of any of the ABPCs described herein, the first antigen-binding domain comprises a light chain variable domain that is at least 90% identical to SEQ ID NO: 503, wherein the light chain variable domain includes a histidine at position 98 in SEQ ID NO: 503; and a heavy chain variable domain that is at least 90% (e.g., at least 92%, at least 94%, at least 96%, at least 98%, at least 99%, or 100%) identical to SEQ ID NO: 502, where the heavy chain variable domain includes a histidine at any of the specific combinations of one or more amino acid positions in SEQ ID NO: 502 listed in Table 7.

[0594] In some examples of any of the ABPCs described herein, the first antigen-binding domain includes a heavy chain variable domain of P3D12 with one or more (e.g., one, two, three, four, five, six, seven, eight, nine, ten, eleven, twelve, thirteen, fourteen, fifteen, sixteen, seventeen, eighteen, nineteen, or twenty) histidine(s) substituted with an alanine. In some examples of any of the ABPCs described herein, the first antigen-binding domain includes a light chain variable domain of P3D12 with one or more (e.g., one, two, three, four, five, six, seven, eight, nine, ten, eleven, twelve, thirteen, fourteen, fifteen, sixteen, seventeen, eighteen, nineteen, or twenty) histidine(s) substituted with an alanine. In some examples of any of the ABPCs described herein, the first antigen-binding domain includes a heavy chain variable domain of P3D12 with one or more (e.g., one, two, three, four, five, six, seven, eight, nine, ten, eleven, twelve, thirteen, fourteen, fifteen, sixteen, seventeen, eighteen, nineteen, or twenty) histidines substituted with an alanine; and a light chain variable domain of P3D12 with one or more (e.g., one, two, three, four, five, six, seven, eight, nine, ten, eleven, twelve, thirteen, fourteen, fifteen, sixteen, seventeen, eighteen, nineteen, or twenty) histidine(s) substituted with an alanine. In some examples of any of the ABPCs described herein, the heavy chain variable domain of P3D12 comprises SEQ ID NO: 502. In some examples of any of the ABPCs described herein, the light chain variable domain of P3D12 comprises SEQ ID NO: 503.

[0595] In some examples of any of the ABPCs described herein, the first antigen-binding domain comprises a heavy chain variable domain comprising a CDR1, a CDR2, and a CDR3 of SEQ ID NO: 504, SEQ ID NO: 505, and SEQ ID NO: 506, respectively, with collectively a total of one or more (e.g., one, two, three, four, five, six, seven, eight, nine, or ten) histidine(s) in SEQ ID NOs: 504-506 substituted with an alanine. In some examples of any of the ABPCs described herein, the first antigen-binding domain comprises a light chain variable domain comprising a CDR1, a CDR2, and a CDR3 of SEQ ID NO: 507, SEQ ID NO: 508, and SEQ ID NO: 509, respectively, with collectively a total of one or more (e.g., one, two, three, four, five, six, seven, eight, nine, or ten) histidine(s) in SEQ ID NOs: 507-509 substituted with an alanine. In some examples of any of the ABPCs described herein, the first antigen-binding domain includes: a heavy chain variable domain comprising a CDR1, a CDR2, and a CDR3 of SEQ ID NO: 504, SEQ ID NO: 505, and SEQ ID NO: 506, respectively, with collectively a total of one or more (e.g., one, two, three, four, five, six, seven, eight, nine, or ten) histidine(s) in SEQ ID NOs: 504-506 substituted with an alanine; and a light chain variable domain comprising a CDR1, a CDR2, and a CDR3 of SEQ ID NO: 507, SEQ ID NO: 508, and SEQ ID NO: 509, respectively, with collectively a total of one or more (e.g., one, two, three, four, five, six, seven, eight, nine, or ten) histidine(s) in SEQ ID NOs: 507-509 substituted with an alanine.

[0596] In some examples of any of the ABPCs described herein, the first antigen-binding domain comprises a heavy chain variable domain of SEQ ID NO: 502, SEQ ID NO: 510, SEQ ID NO: 511, SEQ ID NO: 512, SEQ ID NO: 513, SEQ ID NO: 514, SEQ ID NO: 515, SEQ ID NO: 516, SEQ ID NO: 517, SEQ ID NO: 518, SEQ ID NO: 519, SEQ ID NO: 520, SEQ ID NO: 521, SEQ ID NO: 522, SEQ ID NO: 523, SEQ ID NO: 524, SEQ ID NO: 525, SEQ ID NO: 526, SEQ ID NO: 527, SEQ ID NO: 528, SEQ ID NO: 529, SEQ ID NO: 530, SEQ ID NO: 531, SEQ ID NO: 532, SEQ ID NO: 533, SEQ ID NO: 534, SEQ ID NO: 535, SEQ ID NO: 536, SEQ ID NO: 537, SEQ ID NO: 538, SEQ ID NO: 539, SEQ ID NO: 540, SEQ ID NO: 541, SEQ ID NO: 542, SEQ ID NO: 543, SEQ ID NO: 544, SEQ ID NO: 545, SEQ ID NO: 546, SEQ ID NO: 547, or SEQ ID NO: 548.

[0597] In some examples of any of the ABPCs described herein, the first antigen-binding domain includes a light chain variable domain of SEQ ID NO: 503, SEQ ID NO: 549, SEQ ID NO: 550, SEQ ID NO: 551, SEQ ID NO: 552, SEQ ID NO: 553, SEQ ID NO: 554, SEQ ID NO: 555, SEQ ID NO: 556, SEQ ID NO: 557, SEQ ID NO: 558, SEQ ID NO: 559, SEQ ID NO: 560, SEQ ID NO: 561, SEQ ID NO: 562, SEQ ID NO: 563, SEQ ID NO: 564, SEQ ID NO: 565, SEQ ID NO: 566, SEQ ID NO: 567, SEQ ID NO: 568, SEQ ID NO: 569, SEQ ID NO: 570, SEQ ID NO: 571, SEQ ID NO: 572, SEQ ID NO: 573, SEQ ID NO: 574, SEQ ID NO: 575, or SEQ ID NO: 576.

[0598] In some examples of any of the ABPCs described herein, the first antigen-binding domain includes a light chain variable domain comprising SEQ ID NO: 503, and a heavy chain variable domain comprising: SEQ ID NO: 510, SEQ ID NO: 511, SEQ ID NO: 512, SEQ ID NO: 513, SEQ ID NO: 514, SEQ ID NO: 515, SEQ ID NO: 516, SEQ ID NO: 517, SEQ ID NO: 518, SEQ ID NO: 519, SEQ ID NO: 520, SEQ ID NO: 521, SEQ ID NO: 522, SEQ ID NO: 523, SEQ ID NO: 524, SEQ ID NO: 525, SEQ ID NO: 526, SEQ ID NO: 527, SEQ ID NO: 528, SEQ ID NO: 529, SEQ ID NO: 530, SEQ ID NO: 531, SEQ ID NO: 532, SEQ ID NO: 533, SEQ ID NO: 534, SEQ ID NO: 535, SEQ ID NO: 536, SEQ ID NO: 537, SEQ ID NO: 538, SEQ ID NO: 539, SEQ ID NO: 540, SEQ ID NO: 541, SEQ ID NO: 542, SEQ ID NO: 543, SEQ ID NO: 544, SEQ ID NO: 545, SEQ ID NO: 546, SEQ ID NO: 547, or SEQ ID NO: 548.

[0599] In some examples of any of the ABPCs described herein, the first antigen-binding domain includes a light chain variable domain comprising SEQ ID NO: 549, and a heavy chain variable domain comprising: SEQ ID NO: 502, SEQ ID NO: 510, SEQ ID NO: 511, SEQ ID NO: 512, SEQ ID NO: 513, SEQ ID NO: 514, SEQ ID NO: 515, SEQ ID NO: 516, SEQ ID NO: 517, SEQ ID NO: 518, SEQ ID NO: 519, SEQ ID NO: 520, SEQ ID NO: 521, SEQ ID NO: 522, SEQ ID NO: 523, SEQ ID NO: 524, SEQ ID NO: 525, SEQ ID NO: 526, SEQ ID NO: 527, SEQ ID NO: 528, SEQ ID NO: 529, SEQ ID NO: 530, SEQ ID NO: 531, SEQ ID NO: 532, SEQ ID NO: 533, SEQ ID NO: 534, SEQ ID NO: 535, SEQ ID NO: 536, SEQ ID NO: 537, SEQ ID NO: 538, SEQ ID NO: 539, SEQ ID NO: 540, SEQ ID NO: 541, SEQ ID NO: 542, SEQ ID NO: 543, SEQ ID NO: 544, SEQ ID NO: 545, SEQ ID NO: 546, SEQ ID NO: 547, or SEQ ID NO: 548.

[0600] In some examples of any of the ABPCs described herein, the first antigen-binding domain includes a light chain variable domain comprising SEQ ID NO: 550, and a heavy chain variable domain comprising: SEQ ID NO: 502, SEQ ID NO: 510, SEQ ID NO: 511, SEQ ID NO: 512, SEQ ID NO: 513, SEQ ID NO: 514, SEQ ID NO: 515, SEQ ID NO: 516, SEQ ID NO: 517, SEQ ID NO: 518, SEQ ID NO: 519, SEQ ID NO: 520, SEQ ID NO: 521, SEQ ID NO: 522, SEQ ID NO: 523, SEQ ID NO: 524, SEQ ID NO: 525, SEQ ID NO: 526, SEQ ID NO: 527, SEQ ID NO: 528, SEQ ID NO: 529, SEQ ID NO: 530, SEQ ID NO: 531, SEQ ID NO: 532, SEQ ID NO: 533, SEQ ID NO: 534, SEQ ID NO: 535, SEQ ID NO: 536, SEQ ID NO: 537, SEQ ID NO: 538, SEQ ID NO: 539, SEQ ID NO: 540, SEQ ID NO: 541, SEQ ID NO: 542, SEQ ID NO: 543, SEQ ID NO: 544, SEQ ID NO: 545, SEQ ID NO: 546, SEQ ID NO: 547, or SEQ ID NO: 548.

[0601] In some examples of any of the ABPCs described herein, the first antigen-binding domain includes a light chain variable domain comprising SEQ ID NO: 551, and a heavy chain variable domain comprising: SEQ ID NO: 502, SEQ ID NO: 510, SEQ ID NO: 511, SEQ ID NO: 512, SEQ ID NO: 513, SEQ ID NO: 514, SEQ ID NO: 515, SEQ ID NO: 516, SEQ ID NO: 517, SEQ ID NO: 518, SEQ ID NO: 519, SEQ ID NO: 520, SEQ ID NO: 521, SEQ ID NO: 522, SEQ ID NO: 523, SEQ ID NO: 524, SEQ ID NO: 525, SEQ ID NO: 526, SEQ ID NO: 527, SEQ ID NO: 528, SEQ ID NO: 529, SEQ ID NO: 530, SEQ ID NO: 531, SEQ ID NO: 532, SEQ ID NO: 533, SEQ ID NO: 534, SEQ ID NO: 535, SEQ ID NO: 536, SEQ ID NO: 537, SEQ ID NO: 538, SEQ ID NO: 539, SEQ ID NO: 540, SEQ ID NO: 541, SEQ ID NO: 542, SEQ ID NO: 543, SEQ ID NO: 544, SEQ ID NO: 545, SEQ ID NO: 546, SEQ ID NO: 547, or SEQ ID NO: 548.

[0602] In some examples of any of the ABPCs described herein, the first antigen-binding domain includes a light chain variable domain comprising SEQ ID NO: 552, and a heavy chain variable domain comprising: SEQ ID NO: 502, SEQ ID NO: 510, SEQ ID NO: 511, SEQ ID NO: 512, SEQ ID NO: 513, SEQ ID NO: 514, SEQ ID NO: 515, SEQ ID NO: 516, SEQ ID NO: 517, SEQ ID NO: 518, SEQ ID NO: 519, SEQ ID NO: 520, SEQ ID NO: 521, SEQ ID NO: 522, SEQ ID NO: 523, SEQ ID NO: 524, SEQ ID NO: 525, SEQ ID NO: 526, SEQ ID NO: 527, SEQ ID NO: 528, SEQ ID NO: 529, SEQ ID NO: 530, SEQ ID NO: 531, SEQ ID NO: 532, SEQ ID NO: 533, SEQ ID NO: 534, SEQ ID NO: 535, SEQ ID NO: 536, SEQ ID NO: 537, SEQ ID NO: 538, SEQ ID NO: 539, SEQ ID NO: 540, SEQ ID NO: 541, SEQ ID NO: 542, SEQ ID NO: 543, SEQ ID NO: 544, SEQ ID NO: 545, SEQ ID NO: 546, SEQ ID NO: 547, or SEQ ID NO: 548.

[0603] In some examples of any of the ABPCs described herein, the first antigen-binding domain includes a light chain variable domain comprising SEQ ID NO: 553, and a heavy chain variable domain comprising: SEQ ID NO: 502, SEQ ID NO: 510, SEQ ID NO: 511, SEQ ID NO: 512, SEQ ID NO: 513, SEQ ID NO: 514, SEQ ID NO: 515, SEQ ID NO: 516, SEQ ID NO: 517, SEQ ID NO: 518, SEQ ID NO: 519, SEQ ID NO: 520, SEQ ID NO: 521, SEQ ID NO: 522, SEQ ID NO: 523, SEQ ID NO: 524, SEQ ID NO: 525, SEQ ID NO: 526, SEQ ID NO: 527, SEQ ID NO: 528, SEQ ID NO: 529, SEQ ID NO: 530, SEQ ID NO: 531, SEQ ID NO: 532, SEQ ID NO: 533, SEQ ID NO: 534, SEQ ID NO: 535, SEQ ID NO: 536, SEQ ID NO: 537, SEQ ID NO: 538, SEQ ID NO: 539, SEQ ID NO: 540, SEQ ID NO: 541, SEQ ID NO: 542, SEQ ID NO: 543, SEQ ID NO: 544, SEQ ID NO: 545, SEQ ID NO: 546, SEQ ID NO: 547, or SEQ ID NO: 548.

[0604] In some examples of any of the ABPCs described herein, the first antigen-binding domain includes a light chain variable domain comprising SEQ ID NO: 554, and a heavy chain variable domain comprising: SEQ ID NO: 502, SEQ ID NO: 510, SEQ ID NO: 511, SEQ ID NO: 512, SEQ ID NO: 513, SEQ ID NO: 514, SEQ ID NO: 515, SEQ ID NO: 516, SEQ ID NO: 517, SEQ ID NO: 518, SEQ ID NO: 519, SEQ ID NO: 520, SEQ ID NO: 521, SEQ ID NO: 522, SEQ ID NO: 523, SEQ ID NO: 524, SEQ ID NO: 525, SEQ ID NO: 526, SEQ ID NO: 527, SEQ ID NO: 528, SEQ ID NO: 529, SEQ ID NO: 530, SEQ ID NO: 531, SEQ ID NO: 532, SEQ ID NO: 533, SEQ ID NO: 534, SEQ ID NO: 535, SEQ ID NO: 536, SEQ ID NO: 537, SEQ ID NO: 538, SEQ ID NO: 539, SEQ ID NO: 540, SEQ ID NO: 541, SEQ ID NO: 542, SEQ ID NO: 543, SEQ ID NO: 544, SEQ ID NO: 545, SEQ ID NO: 546, SEQ ID NO: 547, or SEQ ID NO: 548.

[0605] In some examples of any of the ABPCs described herein, the first antigen-binding domain includes a light chain variable domain comprising SEQ ID NO: 555, and a heavy chain variable domain comprising: SEQ ID NO: 502, SEQ ID NO: 510, SEQ ID NO: 511, SEQ ID NO: 512, SEQ ID NO: 513, SEQ ID NO: 514, SEQ ID NO: 515, SEQ ID NO: 516, SEQ ID NO: 517, SEQ ID NO: 518, SEQ ID NO: 519, SEQ ID NO: 520, SEQ ID NO: 521, SEQ ID NO: 522, SEQ ID NO: 523, SEQ ID NO: 524, SEQ ID NO: 525, SEQ ID NO: 526, SEQ ID NO: 527, SEQ ID NO: 528, SEQ ID NO: 529, SEQ ID NO: 530, SEQ ID NO: 531, SEQ ID NO: 532, SEQ ID NO: 533, SEQ ID NO: 534, SEQ ID NO: 535, SEQ ID NO: 536, SEQ ID NO: 537, SEQ ID NO: 538, SEQ ID NO: 539, SEQ ID NO: 540, SEQ ID NO: 541, SEQ ID NO: 542, SEQ ID NO: 543, SEQ ID NO: 544, SEQ ID NO: 545, SEQ ID NO: 546, SEQ ID NO: 547, or SEQ ID NO: 548.

[0606] In some examples of any of the ABPCs described herein, the first antigen-binding domain includes a light chain variable domain comprising SEQ ID NO: 556, and a heavy chain variable domain comprising: SEQ ID NO: 502, SEQ ID NO: 510, SEQ ID NO: 511, SEQ ID NO: 512, SEQ ID NO: 513, SEQ ID NO: 514, SEQ ID NO: 515, SEQ ID NO: 516, SEQ ID NO: 517, SEQ ID NO: 518, SEQ ID NO: 519, SEQ ID NO: 520, SEQ ID NO: 521, SEQ ID NO: 522, SEQ ID NO: 523, SEQ ID NO: 524, SEQ ID NO: 525, SEQ ID NO: 526, SEQ ID NO: 527, SEQ ID NO: 528, SEQ ID NO: 529, SEQ ID NO: 530, SEQ ID NO: 531, SEQ ID NO: 532, SEQ ID NO: 533, SEQ ID NO: 534, SEQ ID NO: 535, SEQ ID NO: 536, SEQ ID NO: 537, SEQ ID NO: 538, SEQ ID NO: 539, SEQ ID NO: 540, SEQ ID NO: 541, SEQ ID NO: 542, SEQ ID NO: 543, SEQ ID NO: 544, SEQ ID NO: 545, SEQ ID NO: 546, SEQ ID NO: 547, or SEQ ID NO: 548.

[0607] In some examples of any of the ABPCs described herein, the first antigen-binding domain includes a light chain variable domain comprising SEQ ID NO: 557, and a heavy chain variable domain comprising: SEQ ID NO: 502, SEQ ID NO: 510, SEQ ID NO: 511, SEQ ID NO: 512, SEQ ID NO: 513, SEQ ID NO: 514, SEQ ID NO: 515, SEQ ID NO: 516, SEQ ID NO: 517, SEQ ID NO: 518, SEQ ID NO: 519, SEQ ID NO: 520, SEQ ID NO: 521, SEQ ID NO: 522, SEQ ID NO: 523, SEQ ID NO: 524, SEQ ID NO: 525, SEQ ID NO: 526, SEQ ID NO: 527, SEQ ID NO: 528, SEQ ID NO: 529, SEQ ID NO: 530, SEQ ID NO: 531, SEQ ID NO: 532, SEQ ID NO: 533, SEQ ID NO: 534, SEQ ID NO: 535, SEQ ID NO: 536, SEQ ID NO: 537, SEQ ID NO: 538, SEQ ID NO: 539, SEQ ID NO: 540, SEQ ID NO: 541, SEQ ID NO: 542, SEQ ID NO: 543, SEQ ID NO: 544, SEQ ID NO: 545, SEQ ID NO: 546, SEQ ID NO: 547, or SEQ ID NO: 548.

[0608] In some examples of any of the ABPCs described herein, the first antigen-binding domain includes a light chain variable domain comprising SEQ ID NO: 558, and a heavy chain variable domain comprising: SEQ ID NO: 502, SEQ ID NO: 510, SEQ ID NO: 511, SEQ ID NO: 512, SEQ ID NO: 513, SEQ ID NO: 514, SEQ ID NO: 515, SEQ ID NO: 516, SEQ ID NO: 517, SEQ ID NO: 518, SEQ ID NO: 519, SEQ ID NO: 520, SEQ ID NO: 521, SEQ ID NO: 522, SEQ ID NO: 523, SEQ ID NO: 524, SEQ ID NO: 525, SEQ ID NO: 526, SEQ ID NO: 527, SEQ ID NO: 528, SEQ ID NO: 529, SEQ ID NO: 530, SEQ ID NO: 531, SEQ ID NO: 532, SEQ ID NO: 533, SEQ ID NO: 534, SEQ ID NO: 535, SEQ ID NO: 536, SEQ ID NO: 537, SEQ ID NO: 538, SEQ ID NO: 539, SEQ ID NO: 540, SEQ ID NO: 541, SEQ ID NO: 542, SEQ ID NO: 543, SEQ ID NO: 544, SEQ ID NO: 545, SEQ ID NO: 546, SEQ ID NO: 547, or SEQ ID NO: 548.

[0609] In some examples of any of the ABPCs described herein, the first antigen-binding domain includes a light chain variable domain comprising SEQ ID NO: 559, and a heavy chain variable domain comprising: SEQ ID NO: 502, SEQ ID NO: 510, SEQ ID NO: 511, SEQ ID NO: 512, SEQ ID NO: 513, SEQ ID NO: 514, SEQ ID NO: 515, SEQ ID NO: 516, SEQ ID NO: 517, SEQ ID NO: 518, SEQ ID NO: 519, SEQ ID NO: 520, SEQ ID NO: 521, SEQ ID NO: 522, SEQ ID NO: 523, SEQ ID NO: 524, SEQ ID NO: 525, SEQ ID NO: 526, SEQ ID NO: 527, SEQ ID NO: 528, SEQ ID NO: 529, SEQ ID NO: 530, SEQ ID NO: 531, SEQ ID NO: 532, SEQ ID NO: 533, SEQ ID NO: 534, SEQ ID NO: 535, SEQ ID NO: 536, SEQ ID NO: 537, SEQ ID NO: 538, SEQ ID NO: 539, SEQ ID NO: 540, SEQ ID NO: 541, SEQ ID NO: 542, SEQ ID NO: 543, SEQ ID NO: 544, SEQ ID NO: 545, SEQ ID NO: 546, SEQ ID NO: 547, or SEQ ID NO: 548.

[0610] In some examples of any of the ABPCs described herein, the first antigen-binding domain includes a light chain variable domain comprising SEQ ID NO: 560, and a heavy chain variable domain comprising: SEQ ID NO: 502, SEQ ID NO: 510, SEQ ID NO: 511, SEQ ID NO: 512, SEQ ID NO: 513, SEQ ID NO: 514, SEQ ID NO: 515, SEQ ID NO: 516, SEQ ID NO: 517, SEQ ID NO: 518, SEQ ID NO: 519, SEQ ID NO: 520, SEQ ID NO: 521, SEQ ID NO: 522, SEQ ID NO: 523, SEQ ID NO: 524, SEQ ID NO: 525, SEQ ID NO: 526, SEQ ID NO: 527, SEQ ID NO: 528, SEQ ID NO: 529, SEQ ID NO: 530, SEQ ID NO: 531, SEQ ID NO: 532, SEQ ID NO: 533, SEQ ID NO: 534, SEQ ID NO: 535, SEQ ID NO: 536, SEQ ID NO: 537, SEQ ID NO: 538, SEQ ID NO: 539, SEQ ID NO: 540, SEQ ID NO: 541, SEQ ID NO: 542, SEQ ID NO: 543, SEQ ID NO: 544, SEQ ID NO: 545, SEQ ID NO: 546, SEQ ID NO: 547, or SEQ ID NO: 548.

[0611] In some examples of any of the ABPCs described herein, the first antigen-binding domain includes a light chain variable domain comprising SEQ ID NO: 561, and a heavy chain variable domain comprising: SEQ ID NO: 502, SEQ ID NO: 510, SEQ ID NO: 511, SEQ ID NO: 512, SEQ ID NO: 513, SEQ ID NO: 514, SEQ ID NO: 515, SEQ ID NO: 516, SEQ ID NO: 517, SEQ ID NO: 518, SEQ ID NO: 519, SEQ ID NO: 520, SEQ ID NO: 521, SEQ ID NO: 522, SEQ ID NO: 523, SEQ ID NO: 524, SEQ ID NO: 525, SEQ ID NO: 526, SEQ ID NO: 527, SEQ ID NO: 528, SEQ ID NO: 529, SEQ ID NO: 530, SEQ ID NO: 531, SEQ ID NO: 532, SEQ ID NO: 533, SEQ ID NO: 534, SEQ ID NO: 535, SEQ ID NO: 536, SEQ ID NO: 537, SEQ ID NO: 538, SEQ ID NO: 539, SEQ ID NO: 540, SEQ ID NO: 541, SEQ ID NO: 542, SEQ ID NO: 543, SEQ ID NO: 544, SEQ ID NO: 545, SEQ ID NO: 546, SEQ ID NO: 547, or SEQ ID NO: 548.

[0612] In some examples of any of the ABPCs described herein, the first antigen-binding domain includes a light chain variable domain comprising SEQ ID NO: 562, and a heavy chain variable domain comprising: SEQ ID NO: 502, SEQ ID NO: 510, SEQ ID NO: 511, SEQ ID NO: 512, SEQ ID NO: 513, SEQ ID NO: 514, SEQ ID NO: 515, SEQ ID NO: 516, SEQ ID NO: 517, SEQ ID NO: 518, SEQ ID NO: 519, SEQ ID NO: 520, SEQ ID NO: 521, SEQ ID NO: 522, SEQ ID NO: 523, SEQ ID NO: 524, SEQ ID NO: 525, SEQ ID NO: 526, SEQ ID NO: 527, SEQ ID NO: 528, SEQ ID NO: 529, SEQ ID NO: 530, SEQ ID NO: 531, SEQ ID NO: 532, SEQ ID NO: 533, SEQ ID NO: 534, SEQ ID NO: 535, SEQ ID NO: 536, SEQ ID NO: 537, SEQ ID NO: 538, SEQ ID NO: 539, SEQ ID NO: 540, SEQ ID NO: 541, SEQ ID NO: 542, SEQ ID NO: 543, SEQ ID NO: 544, SEQ ID NO: 545, SEQ ID NO: 546, SEQ ID NO: 547, or SEQ ID NO: 548.

[0613] In some examples of any of the ABPCs described herein, the first antigen-binding domain includes a light chain variable domain comprising SEQ ID NO: 563, and a heavy chain variable domain comprising: SEQ ID NO: 502, SEQ ID NO: 510, SEQ ID NO: 511, SEQ ID NO: 512, SEQ ID NO: 513, SEQ ID NO: 514, SEQ ID NO: 515, SEQ ID NO: 516, SEQ ID NO: 517, SEQ ID NO: 518, SEQ ID NO: 519, SEQ ID NO: 520, SEQ ID NO: 521, SEQ ID NO: 522, SEQ ID NO: 523, SEQ ID NO: 524, SEQ ID NO: 525, SEQ ID NO: 526, SEQ ID NO: 527, SEQ ID NO: 528, SEQ ID NO: 529, SEQ ID NO: 530, SEQ ID NO: 531, SEQ ID NO: 532, SEQ ID NO: 533, SEQ ID NO: 534, SEQ ID NO: 535, SEQ ID NO: 536, SEQ ID NO: 537, SEQ ID NO: 538, SEQ ID NO: 539, SEQ ID NO: 540, SEQ ID NO: 541, SEQ ID NO: 542, SEQ ID NO: 543, SEQ ID NO: 544, SEQ ID NO: 545, SEQ ID NO: 546, SEQ ID NO: 547, or SEQ ID NO: 548.

[0614] In some examples of any of the ABPCs described herein, the first antigen-binding domain includes a light chain variable domain comprising SEQ ID NO: 564, and a heavy chain variable domain comprising: SEQ ID NO: 502, SEQ ID NO: 510, SEQ ID NO: 511, SEQ ID NO: 512, SEQ ID NO: 513, SEQ ID NO: 514, SEQ ID NO: 515, SEQ ID NO: 516, SEQ ID NO: 517, SEQ ID NO: 518, SEQ ID NO: 519, SEQ ID NO: 520, SEQ ID NO: 521, SEQ ID NO: 522, SEQ ID NO: 523, SEQ ID NO: 524, SEQ ID NO: 525, SEQ ID NO: 526, SEQ ID NO: 527, SEQ ID NO: 528, SEQ ID NO: 529, SEQ ID NO: 530, SEQ ID NO: 531, SEQ ID NO: 532, SEQ ID NO: 533, SEQ ID NO: 534, SEQ ID NO: 535, SEQ ID NO: 536, SEQ ID NO: 537, SEQ ID NO: 538, SEQ ID NO: 539, SEQ ID NO: 540, SEQ ID NO: 541, SEQ ID NO: 542, SEQ ID NO: 543, SEQ ID NO: 544, SEQ ID NO: 545, SEQ ID NO: 546, SEQ ID NO: 547, or SEQ ID NO: 548.

[0615] In some examples of any of the ABPCs described herein, the first antigen-binding domain includes a light chain variable domain comprising SEQ ID NO: 565, and a heavy chain variable domain comprising: SEQ ID NO: 502, SEQ ID NO: 510, SEQ ID NO: 511, SEQ ID NO: 512, SEQ ID NO: 513, SEQ ID NO: 514, SEQ ID NO: 515, SEQ ID NO: 516, SEQ ID NO: 517, SEQ ID NO: 518, SEQ ID NO: 519, SEQ ID NO: 520, SEQ ID NO: 521, SEQ ID NO: 522, SEQ ID NO: 523, SEQ ID NO: 524, SEQ ID NO: 525, SEQ ID NO: 526, SEQ ID NO: 527, SEQ ID NO: 528, SEQ ID NO: 529, SEQ ID NO: 530, SEQ ID NO: 531, SEQ ID NO: 532, SEQ ID NO: 533, SEQ ID NO: 534, SEQ ID NO: 535, SEQ ID NO: 536, SEQ ID NO: 537, SEQ ID NO: 538, SEQ ID NO: 539, SEQ ID NO: 540, SEQ ID NO: 541, SEQ ID NO: 542, SEQ ID NO: 543, SEQ ID NO: 544, SEQ ID NO: 545, SEQ ID NO: 546, SEQ ID NO: 547, or SEQ ID NO: 548.

[0616] In some examples of any of the ABPCs described herein, the first antigen-binding domain includes a light chain variable domain comprising SEQ ID NO: 566, and a heavy chain variable domain comprising: SEQ ID NO: 502, SEQ ID NO: 510, SEQ ID NO: 511, SEQ ID NO: 512, SEQ ID NO: 513, SEQ ID NO: 514, SEQ ID NO: 515, SEQ ID NO: 516, SEQ ID NO: 517, SEQ ID NO: 518, SEQ ID NO: 519, SEQ ID NO: 520, SEQ ID NO: 521, SEQ ID NO: 522, SEQ ID NO: 523, SEQ ID NO: 524, SEQ ID NO: 525, SEQ ID NO: 526, SEQ ID NO: 527, SEQ ID NO: 528, SEQ ID NO: 529, SEQ ID NO: 530, SEQ ID NO: 531, SEQ ID NO: 532, SEQ ID NO: 533, SEQ ID NO: 534, SEQ ID NO: 535, SEQ ID NO: 536, SEQ ID NO: 537, SEQ ID NO: 538, SEQ ID NO: 539, SEQ ID NO: 540, SEQ ID NO: 541, SEQ ID NO: 542, SEQ ID NO: 543, SEQ ID NO: 544, SEQ ID NO: 545, SEQ ID NO: 546, SEQ ID NO: 547, or SEQ ID NO: 548.

[0617] In some examples of any of the ABPCs described herein, the first antigen-binding domain includes a light chain variable domain comprising SEQ ID NO: 567, and a heavy chain variable domain comprising: SEQ ID NO: 502, SEQ ID NO: 510, SEQ ID NO: 511, SEQ ID NO: 512, SEQ ID NO: 513, SEQ ID NO: 514, SEQ ID NO: 515, SEQ ID NO: 516, SEQ ID NO: 517, SEQ ID NO: 518, SEQ ID NO: 519, SEQ ID NO: 520, SEQ ID NO: 521, SEQ ID NO: 522, SEQ ID NO: 523, SEQ ID NO: 524, SEQ ID NO: 525, SEQ ID NO: 526, SEQ ID NO: 527, SEQ ID NO: 528, SEQ ID NO: 529, SEQ ID NO: 530, SEQ ID NO: 531, SEQ ID NO: 532, SEQ ID NO: 533, SEQ ID NO: 534, SEQ ID NO: 535, SEQ ID NO: 536, SEQ ID NO: 537, SEQ ID NO: 538, SEQ ID NO: 539, SEQ ID NO: 540, SEQ ID NO: 541, SEQ ID NO: 542, SEQ ID NO: 543, SEQ ID NO: 544, SEQ ID NO: 545, SEQ ID NO: 546, SEQ ID NO: 547, or SEQ ID NO: 548.

[0618] In some examples of any of the ABPCs described herein, the first antigen-binding domain includes a light chain variable domain comprising SEQ ID NO: 568, and a heavy chain variable domain comprising: SEQ ID NO: 502, SEQ ID NO: 510, SEQ ID NO: 511, SEQ ID NO: 512, SEQ ID NO: 513, SEQ ID NO: 514, SEQ ID NO: 515, SEQ ID NO: 516, SEQ ID NO: 517, SEQ ID NO: 518, SEQ ID NO: 519, SEQ ID NO: 520, SEQ ID NO: 521, SEQ ID NO: 522, SEQ ID NO: 523, SEQ ID NO: 524, SEQ ID NO: 525, SEQ ID NO: 526, SEQ ID NO: 527, SEQ ID NO: 528, SEQ ID NO: 529, SEQ ID NO: 530, SEQ ID NO: 531, SEQ ID NO: 532, SEQ ID NO: 533, SEQ ID NO: 534, SEQ ID NO: 535, SEQ ID NO: 536, SEQ ID NO: 537, SEQ ID NO: 538, SEQ ID NO: 539, SEQ ID NO: 540, SEQ ID NO: 541, SEQ ID NO: 542, SEQ ID NO: 543, SEQ ID NO: 544, SEQ ID NO: 545, SEQ ID NO: 546, SEQ ID NO: 547, or SEQ ID NO: 548.

[0619] In some examples of any of the ABPCs described herein, the first antigen-binding domain includes a light chain variable domain comprising SEQ ID NO: 569, and a heavy chain variable domain comprising: SEQ ID NO: 502, SEQ ID NO: 510, SEQ ID NO: 511, SEQ ID NO: 512, SEQ ID NO: 513, SEQ ID NO: 514, SEQ ID NO: 515, SEQ ID NO: 516, SEQ ID NO: 517, SEQ ID NO: 518, SEQ ID NO: 519, SEQ ID NO: 520, SEQ ID NO: 521, SEQ ID NO: 522, SEQ ID NO: 523, SEQ ID NO: 524, SEQ ID NO: 525, SEQ ID NO: 526, SEQ ID NO: 527, SEQ ID NO: 528, SEQ ID NO: 529, SEQ ID NO: 530, SEQ ID NO: 531, SEQ ID NO: 532, SEQ ID NO: 533, SEQ ID NO: 534, SEQ ID NO: 535, SEQ ID NO: 536, SEQ ID NO: 537, SEQ ID NO: 538, SEQ ID NO: 539, SEQ ID NO: 540, SEQ ID NO: 541, SEQ ID NO: 542, SEQ ID NO: 543, SEQ ID NO: 544, SEQ ID NO: 545, SEQ ID NO: 546, SEQ ID NO: 547, or SEQ ID NO: 548.

[0620] In some examples of any of the ABPCs described herein, the first antigen-binding domain includes a light chain variable domain comprising SEQ ID NO: 570, and a heavy chain variable domain comprising: SEQ ID NO: 502, SEQ ID NO: 510, SEQ ID NO: 511, SEQ ID NO: 512, SEQ ID NO: 513, SEQ ID NO: 514, SEQ ID NO: 515, SEQ ID NO: 516, SEQ ID NO: 517, SEQ ID NO: 518, SEQ ID NO: 519, SEQ ID NO: 520, SEQ ID NO: 521, SEQ ID NO: 522, SEQ ID NO: 523, SEQ ID NO: 524, SEQ ID NO: 525, SEQ ID NO: 526, SEQ ID NO: 527, SEQ ID NO: 528, SEQ ID NO: 529, SEQ ID NO: 530, SEQ ID NO: 531, SEQ ID NO: 532, SEQ ID NO: 533, SEQ ID NO: 534, SEQ ID NO: 535, SEQ ID NO: 536, SEQ ID NO: 537, SEQ ID NO: 538, SEQ ID NO: 539, SEQ ID NO: 540, SEQ ID NO: 541, SEQ ID NO: 542, SEQ ID NO: 543, SEQ ID NO: 544, SEQ ID NO: 545, SEQ ID NO: 546, SEQ ID NO: 547, or SEQ ID NO: 548.

[0621] In some examples of any of the ABPCs described herein, the first antigen-binding domain includes a light chain variable domain comprising SEQ ID NO: 571, and a heavy chain variable domain comprising: SEQ ID NO: 502, SEQ ID NO: 510, SEQ ID NO: 511, SEQ ID NO: 512, SEQ ID NO: 513, SEQ ID NO: 514, SEQ ID NO: 515, SEQ ID NO: 516, SEQ ID NO: 517, SEQ ID NO: 518, SEQ ID NO: 519, SEQ ID NO: 520, SEQ ID NO: 521, SEQ ID NO: 522, SEQ ID NO: 523, SEQ ID NO: 524, SEQ ID NO: 525, SEQ ID NO: 526, SEQ ID NO: 527, SEQ ID NO: 528, SEQ ID NO: 529, SEQ ID NO: 530, SEQ ID NO: 531, SEQ ID NO: 532, SEQ ID NO: 533, SEQ ID NO: 534, SEQ ID NO: 535, SEQ ID NO: 536, SEQ ID NO: 537, SEQ ID NO: 538, SEQ ID NO: 539, SEQ ID NO: 540, SEQ ID NO: 541, SEQ ID NO: 542, SEQ ID NO: 543, SEQ ID NO: 544, SEQ ID NO: 545, SEQ ID NO: 546, SEQ ID NO: 547, or SEQ ID NO: 548.

[0622] In some examples of any of the ABPCs described herein, the first antigen-binding domain includes a light chain variable domain comprising SEQ ID NO: 572, and a heavy chain variable domain comprising: SEQ ID NO: 502, SEQ ID NO: 510, SEQ ID NO: 511, SEQ ID NO: 512, SEQ ID NO: 513, SEQ ID NO: 514, SEQ ID NO: 515, SEQ ID NO: 516, SEQ ID NO: 517, SEQ ID NO: 518, SEQ ID NO: 519, SEQ ID NO: 520, SEQ ID NO: 521, SEQ ID NO: 522, SEQ ID NO: 523, SEQ ID NO: 524, SEQ ID NO: 525, SEQ ID NO: 526, SEQ ID NO: 527, SEQ ID NO: 528, SEQ ID NO: 529, SEQ ID NO: 530, SEQ ID NO: 531, SEQ ID NO: 532, SEQ ID NO: 533, SEQ ID NO: 534, SEQ ID NO: 535, SEQ ID NO: 536, SEQ ID NO: 537, SEQ ID NO: 538, SEQ ID NO: 539, SEQ ID NO: 540, SEQ ID NO: 541, SEQ ID NO: 542, SEQ ID NO: 543, SEQ ID NO: 544, SEQ ID NO: 545, SEQ ID NO: 546, SEQ ID NO: 547, or SEQ ID NO: 548.

[0623] In some examples of any of the ABPCs described herein, the first antigen-binding domain includes a light chain variable domain comprising SEQ ID NO: 573, and a heavy chain variable domain comprising: SEQ ID NO: 502, SEQ ID NO: 510, SEQ ID NO: 511, SEQ ID NO: 512, SEQ ID NO: 513, SEQ ID NO: 514, SEQ ID NO: 515, SEQ ID NO: 516, SEQ ID NO: 517, SEQ ID NO: 518, SEQ ID NO: 519, SEQ ID NO: 520, SEQ ID NO: 521, SEQ ID NO: 522, SEQ ID NO: 523, SEQ ID NO: 524, SEQ ID NO: 525, SEQ ID NO: 526, SEQ ID NO: 527, SEQ ID NO: 528, SEQ ID NO: 529, SEQ ID NO: 530, SEQ ID NO: 531, SEQ ID NO: 532, SEQ ID NO: 533, SEQ ID NO: 534, SEQ ID NO: 535, SEQ ID NO: 536, SEQ ID NO: 537, SEQ ID NO: 538, SEQ ID NO: 539, SEQ ID NO: 540, SEQ ID NO: 541, SEQ ID NO: 542, SEQ ID NO: 543, SEQ ID NO: 544, SEQ ID NO: 545, SEQ ID NO: 546, SEQ ID NO: 547, or SEQ ID NO: 548.

[0624] In some examples of any of the ABPCs described herein, the first antigen-binding domain includes a light chain variable domain comprising SEQ ID NO: 574, and a heavy chain variable domain comprising: SEQ ID NO: 502, SEQ ID NO: 510, SEQ ID NO: 511, SEQ ID NO: 512, SEQ ID NO: 513, SEQ ID NO: 514, SEQ ID NO: 515, SEQ ID NO: 516, SEQ ID NO: 517, SEQ ID NO: 518, SEQ ID NO: 519, SEQ ID NO: 520, SEQ ID NO: 521, SEQ ID NO: 522, SEQ ID NO: 523, SEQ ID NO: 524, SEQ ID NO: 525, SEQ ID NO: 526, SEQ ID NO: 527, SEQ ID NO: 528, SEQ ID NO: 529, SEQ ID NO: 530, SEQ ID NO: 531, SEQ ID NO: 532, SEQ ID NO: 533, SEQ ID NO: 534, SEQ ID NO: 535, SEQ ID NO: 536, SEQ ID NO: 537, SEQ ID NO: 538, SEQ ID NO: 539, SEQ ID NO: 540, SEQ ID NO: 541, SEQ ID NO: 542, SEQ ID NO: 543, SEQ ID NO: 544, SEQ ID NO: 545, SEQ ID NO: 546, SEQ ID NO: 547, or SEQ ID NO: 548.

[0625] In some examples of any of the ABPCs described herein, the first antigen-binding domain includes a light chain variable domain comprising SEQ ID NO: 575, and a heavy chain variable domain comprising: SEQ ID NO: 502, SEQ ID NO: 510, SEQ ID NO: 511, SEQ ID NO: 512, SEQ ID NO: 513, SEQ ID NO: 514, SEQ ID NO: 515, SEQ ID NO: 516, SEQ ID NO: 517, SEQ ID NO: 518, SEQ ID NO: 519, SEQ ID NO: 520, SEQ ID NO: 521, SEQ ID NO: 522, SEQ ID NO: 523, SEQ ID NO: 524, SEQ ID NO: 525, SEQ ID NO: 526, SEQ ID NO: 527, SEQ ID NO: 528, SEQ ID NO: 529, SEQ ID NO: 530, SEQ ID NO: 531, SEQ ID NO: 532, SEQ ID NO: 533, SEQ ID NO: 534, SEQ ID NO: 535, SEQ ID NO: 536, SEQ ID NO: 537, SEQ ID NO: 538, SEQ ID NO: 539, SEQ ID NO: 540, SEQ ID NO: 541, SEQ ID NO: 542, SEQ ID NO: 543, SEQ ID NO: 544, SEQ ID NO: 545, SEQ ID NO: 546, SEQ ID NO: 547, or SEQ ID NO: 548.

[0626] In some examples of any of the ABPCs described herein, the first antigen-binding domain includes a light chain variable domain comprising SEQ ID NO: 576, and a heavy chain variable domain comprising: SEQ ID NO: 502, SEQ ID NO: 510, SEQ ID NO: 511, SEQ ID NO: 512, SEQ ID NO: 513, SEQ ID NO: 514, SEQ ID NO: 515, SEQ ID NO: 516, SEQ ID NO: 517, SEQ ID NO: 518, SEQ ID NO: 519, SEQ ID NO: 520, SEQ ID NO: 521, SEQ ID NO: 522, SEQ ID NO: 523, SEQ ID NO: 524, SEQ ID NO: 525, SEQ ID NO: 526, SEQ ID NO: 527, SEQ ID NO: 528, SEQ ID NO: 529, SEQ ID NO: 530, SEQ ID NO: 531, SEQ ID NO: 532, SEQ ID NO: 533, SEQ ID NO: 534, SEQ ID NO: 535, SEQ ID NO: 536, SEQ ID NO: 537, SEQ ID NO: 538, SEQ ID NO: 539, SEQ ID NO: 540, SEQ ID NO: 541, SEQ ID NO: 542, SEQ ID NO: 543, SEQ ID NO: 544, SEQ ID NO: 545, SEQ ID NO: 546, SEQ ID NO: 547, or SEQ ID NO: 548.

[0627] In some examples of any of the ABPCs described herein, the first antigen-binding domain includes a heavy chain variable domain comprising: SEQ ID NO: 577, SEQ ID NO: 578, SEQ ID NO: 579, SEQ ID NO: 580, SEQ ID NO: 581, SEQ ID NO: 582, SEQ ID NO: 583, SEQ ID NO: 584, SEQ ID NO: 585, SEQ ID NO: 586, SEQ ID NO: 587, SEQ ID NO: 588, SEQ ID NO: 589, SEQ ID NO: 590, SEQ ID NO: 591, SEQ ID NO: 592, SEQ ID NO: 593, SEQ ID NO: 594, SEQ ID NO: 595, SEQ ID NO: 596, SEQ ID NO: 597, SEQ ID NO: 598, SEQ ID NO: 599, SEQ ID NO: 600, SEQ ID NO: 601, SEQ ID NO: 602, SEQ ID NO: 603, SEQ ID NO: 604, SEQ ID NO: 605, SEQ ID NO: 606, SEQ ID NO: 607, SEQ ID NO: 608, SEQ ID NO: 609, SEQ ID NO: 610, SEQ ID NO: 611, SEQ ID NO: 612, SEQ ID NO: 613, SEQ ID NO: 614, SEQ ID NO: 615, SEQ ID NO: 616, SEQ ID NO: 617, SEQ ID NO: 618, SEQ ID NO: 619, SEQ ID NO: 620, SEQ ID NO: 621, SEQ ID NO: 622, SEQ ID NO: 623, SEQ ID NO: 624, SEQ ID NO: 625, SEQ ID NO: 626, SEQ ID NO: 627, SEQ ID NO: 628, SEQ ID NO: 629, SEQ ID NO: 630, SEQ ID NO: 631, SEQ ID NO: 632, SEQ ID NO: 633, SEQ ID NO: 634, SEQ ID NO: 635, SEQ ID NO: 636, SEQ ID NO: 637, SEQ ID NO: 638, SEQ ID NO: 639, SEQ ID NO: 640, SEQ ID NO: 641, SEQ ID NO: 642, SEQ ID NO: 643, SEQ ID NO: 644, SEQ ID NO: 645, SEQ ID NO: 646, SEQ ID NO: 647, SEQ ID NO: 648, SEQ ID NO: 649, SEQ ID NO: 650, SEQ ID NO: 651, SEQ ID NO: 652, SEQ ID NO: 653, SEQ ID NO: 654, SEQ ID NO: 655, SEQ ID NO: 656, SEQ ID NO: 657, SEQ ID NO: 658, SEQ ID NO: 659, SEQ ID NO: 660, SEQ ID NO: 661, SEQ ID NO: 662, SEQ ID NO: 663, SEQ ID NO: 664, SEQ ID NO: 665, SEQ ID NO: 666, SEQ ID NO: 667, SEQ ID NO: 668, SEQ ID NO: 669, SEQ ID NO: 670, SEQ ID NO: 671, SEQ ID NO: 672, SEQ ID NO: 673, SEQ ID NO: 674, SEQ ID NO: 675, SEQ ID NO: 676, SEQ ID NO: 677, SEQ ID NO: 678, SEQ ID NO: 679, SEQ ID NO: 680, SEQ ID NO: 681, SEQ ID NO: 682, SEQ ID NO: 683, SEQ ID NO: 684, SEQ ID NO: 685, SEQ ID NO: 686, SEQ ID NO: 687, SEQ ID NO: 688, SEQ ID NO: 689, SEQ ID NO: 690, SEQ ID NO: 691, SEQ ID NO: 692, SEQ ID NO: 693, SEQ ID NO: 694, SEQ ID NO: 695, or SEQ ID NO: 696.

[0628] In some examples of any of the ABPCs described herein, the first antigen-binding domain includes a light chain variable domain comprising SEQ ID NO: 503, and a heavy chain variable domain comprising SEQ ID NO: 577, SEQ ID NO: 578, SEQ ID NO: 579, SEQ ID NO: 580, SEQ ID NO: 581, SEQ ID NO: 582, SEQ ID NO: 583, SEQ ID NO: 584, SEQ ID NO: 585, SEQ ID NO: 586, SEQ ID NO: 587, SEQ ID NO: 588, SEQ ID NO: 589, SEQ ID NO: 590, SEQ ID NO: 591, SEQ ID NO: 592, SEQ ID NO: 593, SEQ ID NO: 594, SEQ ID NO: 595, SEQ ID NO: 596, SEQ ID NO: 597, SEQ ID NO: 598, SEQ ID NO: 599, SEQ ID NO: 600, SEQ ID NO: 601, SEQ ID NO: 602, SEQ ID NO: 603, SEQ ID NO: 604, SEQ ID NO: 605, SEQ ID NO: 606, SEQ ID NO: 607, SEQ ID NO: 608, SEQ ID NO: 609, SEQ ID NO: 610, SEQ ID NO: 611, SEQ ID NO: 612, SEQ ID NO: 613, SEQ ID NO: 614, SEQ ID NO: 615, SEQ ID NO: 616, SEQ ID NO: 617, SEQ ID NO: 618, SEQ ID NO: 619, SEQ ID NO: 620, SEQ ID NO: 621, SEQ ID NO: 622, SEQ ID NO: 623, SEQ ID NO: 624, SEQ ID NO: 625, SEQ ID NO: 626, SEQ ID NO: 627, SEQ ID NO: 628, SEQ ID NO: 629, SEQ ID NO: 630, SEQ ID NO: 631, SEQ ID NO: 632, SEQ ID NO: 633, SEQ ID NO: 634, SEQ ID NO: 635, SEQ ID NO: 636, SEQ ID NO: 637, SEQ ID NO: 638, SEQ ID NO: 639, SEQ ID NO: 640, SEQ ID NO: 641, SEQ ID NO: 642, SEQ ID NO: 643, SEQ ID NO: 644, SEQ ID NO: 645, SEQ ID NO: 646, SEQ ID NO: 647, SEQ ID NO: 648, SEQ ID NO: 649, SEQ ID NO: 650, SEQ ID NO: 651, SEQ ID NO: 652, SEQ ID NO: 653, SEQ ID NO: 654, SEQ ID NO: 655, SEQ ID NO: 656, SEQ ID NO: 657, SEQ ID NO: 658, SEQ ID NO: 659, SEQ ID NO: 660, SEQ ID NO: 661, SEQ ID NO: 662, SEQ ID NO: 663, SEQ ID NO: 664, SEQ ID NO: 665, SEQ ID NO: 666, SEQ ID NO: 667, SEQ ID NO: 668, SEQ ID NO: 669, SEQ ID NO: 670, SEQ ID NO: 671, SEQ ID NO: 672, SEQ ID NO: 673, SEQ ID NO: 674, SEQ ID NO: 675, SEQ ID NO: 676, SEQ ID NO: 677, SEQ ID NO: 678, SEQ ID NO: 679, SEQ ID NO: 680, SEQ ID NO: 681, SEQ ID NO: 682, SEQ ID NO: 683, SEQ ID NO: 684, SEQ ID NO: 685, SEQ ID NO: 686, SEQ ID NO: 687, SEQ ID NO: 688, SEQ ID NO: 689, SEQ ID NO: 690, SEQ ID NO: 691, SEQ ID NO: 692, SEQ ID NO: 693, SEQ ID NO: 694, SEQ ID NO: 695, or SEQ ID NO: 696.

[0629] In some examples of any of the ABPCs described herein, the first antigen-binding domain includes a light chain variable domain comprising SEQ ID NO: 549, and a heavy chain variable domain comprising SEQ ID NO: 577, SEQ ID NO: 578, SEQ ID NO: 579, SEQ ID NO: 580, SEQ ID NO: 581, SEQ ID NO: 582, SEQ ID NO: 583, SEQ ID NO: 584, SEQ ID NO: 585, SEQ ID NO: 586, SEQ ID NO: 587, SEQ ID NO: 588, SEQ ID NO: 589, SEQ ID NO: 590, SEQ ID NO: 591, SEQ ID NO: 592, SEQ ID NO: 593, SEQ ID NO: 594, SEQ ID NO: 595, SEQ ID NO: 596, SEQ ID NO: 597, SEQ ID NO: 598, SEQ ID NO: 599, SEQ ID NO: 600, SEQ ID NO: 601, SEQ ID NO: 602, SEQ ID NO: 603, SEQ ID NO: 604, SEQ ID NO: 605, SEQ ID NO: 606, SEQ ID NO: 607, SEQ ID NO: 608, SEQ ID NO: 609, SEQ ID NO: 610, SEQ ID NO: 611, SEQ ID NO: 612, SEQ ID NO: 613, SEQ ID NO: 614, SEQ ID NO: 615, SEQ ID NO: 616, SEQ ID NO: 617, SEQ ID NO: 618, SEQ ID NO: 619, SEQ ID NO: 620, SEQ ID NO: 621, SEQ ID NO: 622, SEQ ID NO: 623, SEQ ID NO: 624, SEQ ID NO: 625, SEQ ID NO: 626, SEQ ID NO: 627, SEQ ID NO: 628, SEQ ID NO: 629, SEQ ID NO: 630, SEQ ID NO: 631, SEQ ID NO: 632, SEQ ID NO: 633, SEQ ID NO: 634, SEQ ID NO: 635, SEQ ID NO: 636, SEQ ID NO: 637, SEQ ID NO: 638, SEQ ID NO: 639, SEQ ID NO: 640, SEQ ID NO: 641, SEQ ID NO: 642, SEQ ID NO: 643, SEQ ID NO: 644, SEQ ID NO: 645, SEQ ID NO: 646, SEQ ID NO: 647, SEQ ID NO: 648, SEQ ID NO: 649, SEQ ID NO: 650, SEQ ID NO: 651, SEQ ID NO: 652, SEQ ID NO: 653, SEQ ID NO: 654, SEQ ID NO: 655, SEQ ID NO: 656, SEQ ID NO: 657, SEQ ID NO: 658, SEQ ID NO: 659, SEQ ID NO: 660, SEQ ID NO: 661, SEQ ID NO: 662, SEQ ID NO: 663, SEQ ID NO: 664, SEQ ID NO: 665, SEQ ID NO: 666, SEQ ID NO: 667, SEQ ID NO: 668, SEQ ID NO: 669, SEQ ID NO: 670, SEQ ID NO: 671, SEQ ID NO: 672, SEQ ID NO: 673, SEQ ID NO: 674, SEQ ID NO: 675, SEQ ID NO: 676, SEQ ID NO: 677, SEQ ID NO: 678, SEQ ID NO: 679, SEQ ID NO: 680, SEQ ID NO: 681, SEQ ID NO: 682, SEQ ID NO: 683, SEQ ID NO: 684, SEQ ID NO: 685, SEQ ID NO: 686, SEQ ID NO: 687, SEQ ID NO: 688, SEQ ID NO: 689, SEQ ID NO: 690, SEQ ID NO: 691, SEQ ID NO: 692, SEQ ID NO: 693, SEQ ID NO: 694, SEQ ID NO: 695, or SEQ ID NO: 696.

[0630] In some examples of any of the ABPCs described herein, the first antigen-binding domain includes a light chain variable domain comprising SEQ ID NO: 550, and a heavy chain variable domain comprising SEQ ID NO: 577, SEQ ID NO: 578, SEQ ID NO: 579, SEQ ID NO: 580, SEQ ID NO: 581, SEQ ID NO: 582, SEQ ID NO: 583, SEQ ID NO: 584, SEQ ID NO: 585, SEQ ID NO: 586, SEQ ID NO: 587, SEQ ID NO: 588, SEQ ID NO: 589, SEQ ID NO: 590, SEQ ID NO: 591, SEQ ID NO: 592, SEQ ID NO: 593, SEQ ID NO: 594, SEQ ID NO: 595, SEQ ID NO: 596, SEQ ID NO: 597, SEQ ID NO: 598, SEQ ID NO: 599, SEQ ID NO: 600, SEQ ID NO: 601, SEQ ID NO: 602, SEQ ID NO: 603, SEQ ID NO: 604, SEQ ID NO: 605, SEQ ID NO: 606, SEQ ID NO: 607, SEQ ID NO: 608, SEQ ID NO: 609, SEQ ID NO: 610, SEQ ID NO: 611, SEQ ID NO: 612, SEQ ID NO: 613, SEQ ID NO: 614, SEQ ID NO: 615, SEQ ID NO: 616, SEQ ID NO: 617, SEQ ID NO: 618, SEQ ID NO: 619, SEQ ID NO: 620, SEQ ID NO: 621, SEQ ID NO: 622, SEQ ID NO: 623, SEQ ID NO: 624, SEQ ID NO: 625, SEQ ID NO: 626, SEQ ID NO: 627, SEQ ID NO: 628, SEQ ID NO: 629, SEQ ID NO: 630, SEQ ID NO: 631, SEQ ID NO: 632, SEQ ID NO: 633, SEQ ID NO: 634, SEQ ID NO: 635, SEQ ID NO: 636, SEQ ID NO: 637, SEQ ID NO: 638, SEQ ID NO: 639, SEQ ID NO: 640, SEQ ID NO: 641, SEQ ID NO: 642, SEQ ID NO: 643, SEQ ID NO: 644, SEQ ID NO: 645, SEQ ID NO: 646, SEQ ID NO: 647, SEQ ID NO: 648, SEQ ID NO: 649, SEQ ID NO: 650, SEQ ID NO: 651, SEQ ID NO: 652, SEQ ID NO: 653, SEQ ID NO: 654, SEQ ID NO: 655, SEQ ID NO: 656, SEQ ID NO: 657, SEQ ID NO: 658, SEQ ID NO: 659, SEQ ID NO: 660, SEQ ID NO: 661, SEQ ID NO: 662, SEQ ID NO: 663, SEQ ID NO: 664, SEQ ID NO: 665, SEQ ID NO: 666, SEQ ID NO: 667, SEQ ID NO: 668, SEQ ID NO: 669, SEQ ID NO: 670, SEQ ID NO: 671, SEQ ID NO: 672, SEQ ID NO: 673, SEQ ID NO: 674, SEQ ID NO: 675, SEQ ID NO: 676, SEQ ID NO: 677, SEQ ID NO: 678, SEQ ID NO: 679, SEQ ID NO: 680, SEQ ID NO: 681, SEQ ID NO: 682, SEQ ID NO: 683, SEQ ID NO: 684, SEQ ID NO: 685, SEQ ID NO: 686, SEQ ID NO: 687, SEQ ID NO: 688, SEQ ID NO: 689, SEQ ID NO: 690, SEQ ID NO: 691, SEQ ID NO: 692, SEQ ID NO: 693, SEQ ID NO: 694, SEQ ID NO: 695, or SEQ ID NO: 696.

[0631] In some examples of any of the ABPCs described herein, the first antigen-binding domain includes a light chain variable domain comprising SEQ ID NO: 551, and a heavy chain variable domain comprising SEQ ID NO: 577, SEQ ID NO: 578, SEQ ID NO: 579, SEQ ID NO: 580, SEQ ID NO: 581, SEQ ID NO: 582, SEQ ID NO: 583, SEQ ID NO: 584, SEQ ID NO: 585, SEQ ID NO: 586, SEQ ID NO: 587, SEQ ID NO: 588, SEQ ID NO: 589, SEQ ID NO: 590, SEQ ID NO: 591, SEQ ID NO: 592, SEQ ID NO: 593, SEQ ID NO: 594, SEQ ID NO: 595, SEQ ID NO: 596, SEQ ID NO: 597, SEQ ID NO: 598, SEQ ID NO: 599, SEQ ID NO: 600, SEQ ID NO: 601, SEQ ID NO: 602, SEQ ID NO: 603, SEQ ID NO: 604, SEQ ID NO: 605, SEQ ID NO: 606, SEQ ID NO: 607, SEQ ID NO: 608, SEQ ID NO: 609, SEQ ID NO: 610, SEQ ID NO: 611, SEQ ID NO: 612, SEQ ID NO: 613, SEQ ID NO: 614, SEQ ID NO: 615, SEQ ID NO: 616, SEQ ID NO: 617, SEQ ID NO: 618, SEQ ID NO: 619, SEQ ID NO: 620, SEQ ID NO: 621, SEQ ID NO: 622, SEQ ID NO: 623, SEQ ID NO: 624, SEQ ID NO: 625, SEQ ID NO: 626, SEQ ID NO: 627, SEQ ID NO: 628, SEQ ID NO: 629, SEQ ID NO: 630, SEQ ID NO: 631, SEQ ID NO: 632, SEQ ID NO: 633, SEQ ID NO: 634, SEQ ID NO: 635, SEQ ID NO: 636, SEQ ID NO: 637, SEQ ID NO: 638, SEQ ID NO: 639, SEQ ID NO: 640, SEQ ID NO: 641, SEQ ID NO: 642, SEQ ID NO: 643, SEQ ID NO: 644, SEQ ID NO: 645, SEQ ID NO: 646, SEQ ID NO: 647, SEQ ID NO: 648, SEQ ID NO: 649, SEQ ID NO: 650, SEQ ID NO: 651, SEQ ID NO: 652, SEQ ID NO: 653, SEQ ID NO: 654, SEQ ID NO: 655, SEQ ID NO: 656, SEQ ID NO: 657, SEQ ID NO: 658, SEQ ID NO: 659, SEQ ID NO: 660, SEQ ID NO: 661, SEQ ID NO: 662, SEQ ID NO: 663, SEQ ID NO: 664, SEQ ID NO: 665, SEQ ID NO: 666, SEQ ID NO: 667, SEQ ID NO: 668, SEQ ID NO: 669, SEQ ID NO: 670, SEQ ID NO: 671, SEQ ID NO: 672, SEQ ID NO: 673, SEQ ID NO: 674, SEQ ID NO: 675, SEQ ID NO: 676, SEQ ID NO: 677, SEQ ID NO: 678, SEQ ID NO: 679, SEQ ID NO: 680, SEQ ID NO: 681, SEQ ID NO: 682, SEQ ID NO: 683, SEQ ID NO: 684, SEQ ID NO: 685, SEQ ID NO: 686, SEQ ID NO: 687, SEQ ID NO: 688, SEQ ID NO: 689, SEQ ID NO: 690, SEQ ID NO: 691, SEQ ID NO: 692, SEQ ID NO: 693, SEQ ID NO: 694, SEQ ID NO: 695, or SEQ ID NO: 696.

[0632] In some examples of any of the ABPCs described herein, the first antigen-binding domain includes a light chain variable domain comprising SEQ ID NO: 552, and a heavy chain variable domain comprising SEQ ID NO: 577, SEQ ID NO: 578, SEQ ID NO: 579, SEQ ID NO: 580, SEQ ID NO: 581, SEQ ID NO: 582, SEQ ID NO: 583, SEQ ID NO: 584, SEQ ID NO: 585, SEQ ID NO: 586, SEQ ID NO: 587, SEQ ID NO: 588, SEQ ID NO: 589, SEQ ID NO: 590, SEQ ID NO: 591, SEQ ID NO: 592, SEQ ID NO: 593, SEQ ID NO: 594, SEQ ID NO: 595, SEQ ID NO: 596, SEQ ID NO: 597, SEQ ID NO: 598, SEQ ID NO: 599, SEQ ID NO: 600, SEQ ID NO: 601, SEQ ID NO: 602, SEQ ID NO: 603, SEQ ID NO: 604, SEQ ID NO: 605, SEQ ID NO: 606, SEQ ID NO: 607, SEQ ID NO: 608, SEQ ID NO: 609, SEQ ID NO: 610, SEQ ID NO: 611, SEQ ID NO: 612, SEQ ID NO: 613, SEQ ID NO: 614, SEQ ID NO: 615, SEQ ID NO: 616, SEQ ID NO: 617, SEQ ID NO: 618, SEQ ID NO: 619, SEQ ID NO: 620, SEQ ID NO: 621, SEQ ID NO: 622, SEQ ID NO: 623, SEQ ID NO: 624, SEQ ID NO: 625, SEQ ID NO: 626, SEQ ID NO: 627, SEQ ID NO: 628, SEQ ID NO: 629, SEQ ID NO: 630, SEQ ID NO: 631, SEQ ID NO: 632, SEQ ID NO: 633, SEQ ID NO: 634, SEQ ID NO: 635, SEQ ID NO: 636, SEQ ID NO: 637, SEQ ID NO: 638, SEQ ID NO: 639, SEQ ID NO: 640, SEQ ID NO: 641, SEQ ID NO: 642, SEQ ID NO: 643, SEQ ID NO: 644, SEQ ID NO: 645, SEQ ID NO: 646, SEQ ID NO: 647, SEQ ID NO: 648, SEQ ID NO: 649, SEQ ID NO: 650, SEQ ID NO: 651, SEQ ID NO: 652, SEQ ID NO: 653, SEQ ID NO: 654, SEQ ID NO: 655, SEQ ID NO: 656, SEQ ID NO: 657, SEQ ID NO: 658, SEQ ID NO: 659, SEQ ID NO: 660, SEQ ID NO: 661, SEQ ID NO: 662, SEQ ID NO: 663, SEQ ID NO: 664, SEQ ID NO: 665, SEQ ID NO: 666, SEQ ID NO: 667, SEQ ID NO: 668, SEQ ID NO: 669, SEQ ID NO: 670, SEQ ID NO: 671, SEQ ID NO: 672, SEQ ID NO: 673, SEQ ID NO: 674, SEQ ID NO: 675, SEQ ID NO: 676, SEQ ID NO: 677, SEQ ID NO: 678, SEQ ID NO: 679, SEQ ID NO: 680, SEQ ID NO: 681, SEQ ID NO: 682, SEQ ID NO: 683, SEQ ID NO: 684, SEQ ID NO: 685, SEQ ID NO: 686, SEQ ID NO: 687, SEQ ID NO: 688, SEQ ID NO: 689, SEQ ID NO: 690, SEQ ID NO: 691, SEQ ID NO: 692, SEQ ID NO: 693, SEQ ID NO: 694, SEQ ID NO: 695, or SEQ ID NO: 696.

[0633] In some examples of any of the ABPCs described herein, the first antigen-binding domain includes a light chain variable domain comprising SEQ ID NO: 553, and a heavy chain variable domain comprising SEQ ID NO: 577, SEQ ID NO: 578, SEQ ID NO: 579, SEQ ID NO: 580, SEQ ID NO: 581, SEQ ID NO: 582, SEQ ID NO: 583, SEQ ID NO: 584, SEQ ID NO: 585, SEQ ID NO: 586, SEQ ID NO: 587, SEQ ID NO: 588, SEQ ID NO: 589, SEQ ID NO: 590, SEQ ID NO: 591, SEQ ID NO: 592, SEQ ID NO: 593, SEQ ID NO: 594, SEQ ID NO: 595, SEQ ID NO: 596, SEQ ID NO: 597, SEQ ID NO: 598, SEQ ID NO: 599, SEQ ID NO: 600, SEQ ID NO: 601, SEQ ID NO: 602, SEQ ID NO: 603, SEQ ID NO: 604, SEQ ID NO: 605, SEQ ID NO: 606, SEQ ID NO: 607, SEQ ID NO: 608, SEQ ID NO: 609, SEQ ID NO: 610, SEQ ID NO: 611, SEQ ID NO: 612, SEQ ID NO: 613, SEQ ID NO: 614, SEQ ID NO: 615, SEQ ID NO: 616, SEQ ID NO: 617, SEQ ID NO: 618, SEQ ID NO: 619, SEQ ID NO: 620, SEQ ID NO: 621, SEQ ID NO: 622, SEQ ID NO: 623, SEQ ID NO: 624, SEQ ID NO: 625, SEQ ID NO: 626, SEQ ID NO: 627, SEQ ID NO: 628, SEQ ID NO: 629, SEQ ID NO: 630, SEQ ID NO: 631, SEQ ID NO: 632, SEQ ID NO: 633, SEQ ID NO: 634, SEQ ID NO: 635, SEQ ID NO: 636, SEQ ID NO: 637, SEQ ID NO: 638, SEQ ID NO: 639, SEQ ID NO: 640, SEQ ID NO: 641, SEQ ID NO: 642, SEQ ID NO: 643, SEQ ID NO: 644, SEQ ID NO: 645, SEQ ID NO: 646, SEQ ID NO: 647, SEQ ID NO: 648, SEQ ID NO: 649, SEQ ID NO: 650, SEQ ID NO: 651, SEQ ID NO: 652, SEQ ID NO: 653, SEQ ID NO: 654, SEQ ID NO: 655, SEQ ID NO: 656, SEQ ID NO: 657, SEQ ID NO: 658, SEQ ID NO: 659, SEQ ID NO: 660, SEQ ID NO: 661, SEQ ID NO: 662, SEQ ID NO: 663, SEQ ID NO: 664, SEQ ID NO: 665, SEQ ID NO: 666, SEQ ID NO: 667, SEQ ID NO: 668, SEQ ID NO: 669, SEQ ID NO: 670, SEQ ID NO: 671, SEQ ID NO: 672, SEQ ID NO: 673, SEQ ID NO: 674, SEQ ID NO: 675, SEQ ID NO: 676, SEQ ID NO: 677, SEQ ID NO: 678, SEQ ID NO: 679, SEQ ID NO: 680, SEQ ID NO: 681, SEQ ID NO: 682, SEQ ID NO: 683, SEQ ID NO: 684, SEQ ID NO: 685, SEQ ID NO: 686, SEQ ID NO: 687, SEQ ID NO: 688, SEQ ID NO: 689, SEQ ID NO: 690, SEQ ID NO: 691, SEQ ID NO: 692, SEQ ID NO: 693, SEQ ID NO: 694, SEQ ID NO: 695, or SEQ ID NO: 696.

[0634] In some examples of any of the ABPCs described herein, the first antigen-binding domain includes a light chain variable domain comprising SEQ ID NO: 554, and a heavy chain variable domain comprising SEQ ID NO: 577, SEQ ID NO: 578, SEQ ID NO: 579, SEQ ID NO: 580, SEQ ID NO: 581, SEQ ID NO: 582, SEQ ID NO: 583, SEQ ID NO: 584, SEQ ID NO: 585, SEQ ID NO: 586, SEQ ID NO: 587, SEQ ID NO: 588, SEQ ID NO: 589, SEQ ID NO: 590, SEQ ID NO: 591, SEQ ID NO: 592, SEQ ID NO: 593, SEQ ID NO: 594, SEQ ID NO: 595, SEQ ID NO: 596, SEQ ID NO: 597, SEQ ID NO: 598, SEQ ID NO: 599, SEQ ID NO: 600, SEQ ID NO: 601, SEQ ID NO: 602, SEQ ID NO: 603, SEQ ID NO: 604, SEQ ID NO: 605, SEQ ID NO: 606, SEQ ID NO: 607, SEQ ID NO: 608, SEQ ID NO: 609, SEQ ID NO: 610, SEQ ID NO: 611, SEQ ID NO: 612, SEQ ID NO: 613, SEQ ID NO: 614, SEQ ID NO: 615, SEQ ID NO: 616, SEQ ID NO: 617, SEQ ID NO: 618, SEQ ID NO: 619, SEQ ID NO: 620, SEQ ID NO: 621, SEQ ID NO: 622, SEQ ID NO: 623, SEQ ID NO: 624, SEQ ID NO: 625, SEQ ID NO: 626, SEQ ID NO: 627, SEQ ID NO: 628, SEQ ID NO: 629, SEQ ID NO: 630, SEQ ID NO: 631, SEQ ID NO: 632, SEQ ID NO: 633, SEQ ID NO: 634, SEQ ID NO: 635, SEQ ID NO: 636, SEQ ID NO: 637, SEQ ID NO: 638, SEQ ID NO: 639, SEQ ID NO: 640, SEQ ID NO: 641, SEQ ID NO: 642, SEQ ID NO: 643, SEQ ID NO: 644, SEQ ID NO: 645, SEQ ID NO: 646, SEQ ID NO: 647, SEQ ID NO: 648, SEQ ID NO: 649, SEQ ID NO: 650, SEQ ID NO: 651, SEQ ID NO: 652, SEQ ID NO: 653, SEQ ID NO: 654, SEQ ID NO: 655, SEQ ID NO: 656, SEQ ID NO: 657, SEQ ID NO: 658, SEQ ID NO: 659, SEQ ID NO: 660, SEQ ID NO: 661, SEQ ID NO: 662, SEQ ID NO: 663, SEQ ID NO: 664, SEQ ID NO: 665, SEQ ID NO: 666, SEQ ID NO: 667, SEQ ID NO: 668, SEQ ID NO: 669, SEQ ID NO: 670, SEQ ID NO: 671, SEQ ID NO: 672, SEQ ID NO: 673, SEQ ID NO: 674, SEQ ID NO: 675, SEQ ID NO: 676, SEQ ID NO: 677, SEQ ID NO: 678, SEQ ID NO: 679, SEQ ID NO: 680, SEQ ID NO: 681, SEQ ID NO: 682, SEQ ID NO: 683, SEQ ID NO: 684, SEQ ID NO: 685, SEQ ID NO: 686, SEQ ID NO: 687, SEQ ID NO: 688, SEQ ID NO: 689, SEQ ID NO: 690, SEQ ID NO: 691, SEQ ID NO: 692, SEQ ID NO: 693, SEQ ID NO: 694, SEQ ID NO: 695, or SEQ ID NO: 696.

[0635] In some examples of any of the ABPCs described herein, the first antigen-binding domain includes a light chain variable domain comprising SEQ ID NO: 555, and a heavy chain variable domain comprising SEQ ID NO: 577, SEQ ID NO: 578, SEQ ID NO: 579, SEQ ID NO: 580, SEQ ID NO: 581, SEQ ID NO: 582, SEQ ID NO: 583, SEQ ID NO: 584, SEQ ID NO: 585, SEQ ID NO: 586, SEQ ID NO: 587, SEQ ID NO: 588, SEQ ID NO: 589, SEQ ID NO: 590, SEQ ID NO: 591, SEQ ID NO: 592, SEQ ID NO: 593, SEQ ID NO: 594, SEQ ID NO: 595, SEQ ID NO: 596, SEQ ID NO: 597, SEQ ID NO: 598, SEQ ID NO: 599, SEQ ID NO: 600, SEQ ID NO: 601, SEQ ID NO: 602, SEQ ID NO: 603, SEQ ID NO: 604, SEQ ID NO: 605, SEQ ID NO: 606, SEQ ID NO: 607, SEQ ID NO: 608, SEQ ID NO: 609, SEQ ID NO: 610, SEQ ID NO: 611, SEQ ID NO: 612, SEQ ID NO: 613, SEQ ID NO: 614, SEQ ID NO: 615, SEQ ID NO: 616, SEQ ID NO: 617, SEQ ID NO: 618, SEQ ID NO: 619, SEQ ID NO: 620, SEQ ID NO: 621, SEQ ID NO: 622, SEQ ID NO: 623, SEQ ID NO: 624, SEQ ID NO: 625, SEQ ID NO: 626, SEQ ID NO: 627, SEQ ID NO: 628, SEQ ID NO: 629, SEQ ID NO: 630, SEQ ID NO: 631, SEQ ID NO: 632, SEQ ID NO: 633, SEQ ID NO: 634, SEQ ID NO: 635, SEQ ID NO: 636, SEQ ID NO: 637, SEQ ID NO: 638, SEQ ID NO: 639, SEQ ID NO: 640, SEQ ID NO: 641, SEQ ID NO: 642, SEQ ID NO: 643, SEQ ID NO: 644, SEQ ID NO: 645, SEQ ID NO: 646, SEQ ID NO: 647, SEQ ID NO: 648, SEQ ID NO: 649, SEQ ID NO: 650, SEQ ID NO: 651, SEQ ID NO: 652, SEQ ID NO: 653, SEQ ID NO: 654, SEQ ID NO: 655, SEQ ID NO: 656, SEQ ID NO: 657, SEQ ID NO: 658, SEQ ID NO: 659, SEQ ID NO: 660, SEQ ID NO: 661, SEQ ID NO: 662, SEQ ID NO: 663, SEQ ID NO: 664, SEQ ID NO: 665, SEQ ID NO: 666, SEQ ID NO: 667, SEQ ID NO: 668, SEQ ID NO: 669, SEQ ID NO: 670, SEQ ID NO: 671, SEQ ID NO: 672, SEQ ID NO: 673, SEQ ID NO: 674, SEQ ID NO: 675, SEQ ID NO: 676, SEQ ID NO: 677, SEQ ID NO: 678, SEQ ID NO: 679, SEQ ID NO: 680, SEQ ID NO: 681, SEQ ID NO: 682, SEQ ID NO: 683, SEQ ID NO: 684, SEQ ID NO: 685, SEQ ID NO: 686, SEQ ID NO: 687, SEQ ID NO: 688, SEQ ID NO: 689, SEQ ID NO: 690, SEQ ID NO: 691, SEQ ID NO: 692, SEQ ID NO: 693, SEQ ID NO: 694, SEQ ID NO: 695, or SEQ ID NO: 696.

[0636] In some examples of any of the ABPCs described herein, the first antigen-binding domain includes a light chain variable domain comprising SEQ ID NO: 556, and a heavy chain variable domain comprising SEQ ID NO: 577, SEQ ID NO: 578, SEQ ID NO: 579, SEQ ID NO: 580, SEQ ID NO: 581, SEQ ID NO: 582, SEQ ID NO: 583, SEQ ID NO: 584, SEQ ID NO: 585, SEQ ID NO: 586, SEQ ID NO: 587, SEQ ID NO: 588, SEQ ID NO: 589, SEQ ID NO: 590, SEQ ID NO: 591, SEQ ID NO: 592, SEQ ID NO: 593, SEQ ID NO: 594, SEQ ID NO: 595, SEQ ID NO: 596, SEQ ID NO: 597, SEQ ID NO: 598, SEQ ID NO: 599, SEQ ID NO: 600, SEQ ID NO: 601, SEQ ID NO: 602, SEQ ID NO: 603, SEQ ID NO: 604, SEQ ID NO: 605, SEQ ID NO: 606, SEQ ID NO: 607, SEQ ID NO: 608, SEQ ID NO: 609, SEQ ID NO: 610, SEQ ID NO: 611, SEQ ID NO: 612, SEQ ID NO: 613, SEQ ID NO: 614, SEQ ID NO: 615, SEQ ID NO: 616, SEQ ID NO: 617, SEQ ID NO: 618, SEQ ID NO: 619, SEQ ID NO: 620, SEQ ID NO: 621, SEQ ID NO: 622, SEQ ID NO: 623, SEQ ID NO: 624, SEQ ID NO: 625, SEQ ID NO: 626, SEQ ID NO: 627, SEQ ID NO: 628, SEQ ID NO: 629, SEQ ID NO: 630, SEQ ID NO: 631, SEQ ID NO: 632, SEQ ID NO: 633, SEQ ID NO: 634, SEQ ID NO: 635, SEQ ID NO: 636, SEQ ID NO: 637, SEQ ID NO: 638, SEQ ID NO: 639, SEQ ID NO: 640, SEQ ID NO: 641, SEQ ID NO: 642, SEQ ID NO: 643, SEQ ID NO: 644, SEQ ID NO: 645, SEQ ID NO: 646, SEQ ID NO: 647, SEQ ID NO: 648, SEQ ID NO: 649, SEQ ID NO: 650, SEQ ID NO: 651, SEQ ID NO: 652, SEQ ID NO: 653, SEQ ID NO: 654, SEQ ID NO: 655, SEQ ID NO: 656, SEQ ID NO: 657, SEQ ID NO: 658, SEQ ID NO: 659, SEQ ID NO: 660, SEQ ID NO: 661, SEQ ID NO: 662, SEQ ID NO: 663, SEQ ID NO: 664, SEQ ID NO: 665, SEQ ID NO: 666, SEQ ID NO: 667, SEQ ID NO: 668, SEQ ID NO: 669, SEQ ID NO: 670, SEQ ID NO: 671, SEQ ID NO: 672, SEQ ID NO: 673, SEQ ID NO: 674, SEQ ID NO: 675, SEQ ID NO: 676, SEQ ID NO: 677, SEQ ID NO: 678, SEQ ID NO: 679, SEQ ID NO: 680, SEQ ID NO: 681, SEQ ID NO: 682, SEQ ID NO: 683, SEQ ID NO: 684, SEQ ID NO: 685, SEQ ID NO: 686, SEQ ID NO: 687, SEQ ID NO: 688, SEQ ID NO: 689, SEQ ID NO: 690, SEQ ID NO: 691, SEQ ID NO: 692, SEQ ID NO: 693, SEQ ID NO: 694, SEQ ID NO: 695, or SEQ ID NO: 696.

[0637] In some examples of any of the ABPCs described herein, the first antigen-binding domain includes a light chain variable domain comprising SEQ ID NO: 557, and a heavy chain variable domain comprising SEQ ID NO: 577, SEQ ID NO: 578, SEQ ID NO: 579, SEQ ID NO: 580, SEQ ID NO: 581, SEQ ID NO: 582, SEQ ID NO: 583, SEQ ID NO: 584, SEQ ID NO: 585, SEQ ID NO: 586, SEQ ID NO: 587, SEQ ID NO: 588, SEQ ID NO: 589, SEQ ID NO: 590, SEQ ID NO: 591, SEQ ID NO: 592, SEQ ID NO: 593, SEQ ID NO: 594, SEQ ID NO: 595, SEQ ID NO: 596, SEQ ID NO: 597, SEQ ID NO: 598, SEQ ID NO: 599, SEQ ID NO: 600, SEQ ID NO: 601, SEQ ID NO: 602, SEQ ID NO: 603, SEQ ID NO: 604, SEQ ID NO: 605, SEQ ID NO: 606, SEQ ID NO: 607, SEQ ID NO: 608, SEQ ID NO: 609, SEQ ID NO: 610, SEQ ID NO: 611, SEQ ID NO: 612, SEQ ID NO: 613, SEQ ID NO: 614, SEQ ID NO: 615, SEQ ID NO: 616, SEQ ID NO: 617, SEQ ID NO: 618, SEQ ID NO: 619, SEQ ID NO: 620, SEQ ID NO: 621, SEQ ID NO: 622, SEQ ID NO: 623, SEQ ID NO: 624, SEQ ID NO: 625, SEQ ID NO: 626, SEQ ID NO: 627, SEQ ID NO: 628, SEQ ID NO: 629, SEQ ID NO: 630, SEQ ID NO: 631, SEQ ID NO: 632, SEQ ID NO: 633, SEQ ID NO: 634, SEQ ID NO: 635, SEQ ID NO: 636, SEQ ID NO: 637, SEQ ID NO: 638, SEQ ID NO: 639, SEQ ID NO: 640, SEQ ID NO: 641, SEQ ID NO: 642, SEQ ID NO: 643, SEQ ID NO: 644, SEQ ID NO: 645, SEQ ID NO: 646, SEQ ID NO: 647, SEQ ID NO: 648, SEQ ID NO: 649, SEQ ID NO: 650, SEQ ID NO: 651, SEQ ID NO: 652, SEQ ID NO: 653, SEQ ID NO: 654, SEQ ID NO: 655, SEQ ID NO: 656, SEQ ID NO: 657, SEQ ID NO: 658, SEQ ID NO: 659, SEQ ID NO: 660, SEQ ID NO: 661, SEQ ID NO: 662, SEQ ID NO: 663, SEQ ID NO: 664, SEQ ID NO: 665, SEQ ID NO: 666, SEQ ID NO: 667, SEQ ID NO: 668, SEQ ID NO: 669, SEQ ID NO: 670, SEQ ID NO: 671, SEQ ID NO: 672, SEQ ID NO: 673, SEQ ID NO: 674, SEQ ID NO: 675, SEQ ID NO: 676, SEQ ID NO: 677, SEQ ID NO: 678, SEQ ID NO: 679, SEQ ID NO: 680, SEQ ID NO: 681, SEQ ID NO: 682, SEQ ID NO: 683, SEQ ID NO: 684, SEQ ID NO: 685, SEQ ID NO: 686, SEQ ID NO: 687, SEQ ID NO: 688, SEQ ID NO: 689, SEQ ID NO: 690, SEQ ID NO: 691, SEQ ID NO: 692, SEQ ID NO: 693, SEQ ID NO: 694, SEQ ID NO: 695, or SEQ ID NO: 696.

[0638] In some examples of any of the ABPCs described herein, the first antigen-binding domain includes a light chain variable domain comprising SEQ ID NO: 558, and a heavy chain variable domain comprising SEQ ID NO: 577, SEQ ID NO: 578, SEQ ID NO: 579, SEQ ID NO: 580, SEQ ID NO: 581, SEQ ID NO: 582, SEQ ID NO: 583, SEQ ID NO: 584, SEQ ID NO: 585, SEQ ID NO: 586, SEQ ID NO: 587, SEQ ID NO: 588, SEQ ID NO: 589, SEQ ID NO: 590, SEQ ID NO: 591, SEQ ID NO: 592, SEQ ID NO: 593, SEQ ID NO: 594, SEQ ID NO: 595, SEQ ID NO: 596, SEQ ID NO: 597, SEQ ID NO: 598, SEQ ID NO: 599, SEQ ID NO: 600, SEQ ID NO: 601, SEQ ID NO: 602, SEQ ID NO: 603, SEQ ID NO: 604, SEQ ID NO: 605, SEQ ID NO: 606, SEQ ID NO: 607, SEQ ID NO: 608, SEQ ID NO: 609, SEQ ID NO: 610, SEQ ID NO: 611, SEQ ID NO: 612, SEQ ID NO: 613, SEQ ID NO: 614, SEQ ID NO: 615, SEQ ID NO: 616, SEQ ID NO: 617, SEQ ID NO: 618, SEQ ID NO: 619, SEQ ID NO: 620, SEQ ID NO: 621, SEQ ID NO: 622, SEQ ID NO: 623, SEQ ID NO: 624, SEQ ID NO: 625, SEQ ID NO: 626, SEQ ID NO: 627, SEQ ID NO: 628, SEQ ID NO: 629, SEQ ID NO: 630, SEQ ID NO: 631, SEQ ID NO: 632, SEQ ID NO: 633, SEQ ID NO: 634, SEQ ID NO: 635, SEQ ID NO: 636, SEQ ID NO: 637, SEQ ID NO: 638, SEQ ID NO: 639, SEQ ID NO: 640, SEQ ID NO: 641, SEQ ID NO: 642, SEQ ID NO: 643, SEQ ID NO: 644, SEQ ID NO: 645, SEQ ID NO: 646, SEQ ID NO: 647, SEQ ID NO: 648, SEQ ID NO: 649, SEQ ID NO: 650, SEQ ID NO: 651, SEQ ID NO: 652, SEQ ID NO: 653, SEQ ID NO: 654, SEQ ID NO: 655, SEQ ID NO: 656, SEQ ID NO: 657, SEQ ID NO: 658, SEQ ID NO: 659, SEQ ID NO: 660, SEQ ID NO: 661, SEQ ID NO: 662, SEQ ID NO: 663, SEQ ID NO: 664, SEQ ID NO: 665, SEQ ID NO: 666, SEQ ID NO: 667, SEQ ID NO: 668, SEQ ID NO: 669, SEQ ID NO: 670, SEQ ID NO: 671, SEQ ID NO: 672, SEQ ID NO: 673, SEQ ID NO: 674, SEQ ID NO: 675, SEQ ID NO: 676, SEQ ID NO: 677, SEQ ID NO: 678, SEQ ID NO: 679, SEQ ID NO: 680, SEQ ID NO: 681, SEQ ID NO: 682, SEQ ID NO: 683, SEQ ID NO: 684, SEQ ID NO: 685, SEQ ID NO: 686, SEQ ID NO: 687, SEQ ID NO: 688, SEQ ID NO: 689, SEQ ID NO: 690, SEQ ID NO: 691, SEQ ID NO: 692, SEQ ID NO: 693, SEQ ID NO: 694, SEQ ID NO: 695, or SEQ ID NO: 696.

[0639] In some examples of any of the ABPCs described herein, the first antigen-binding domain includes a light chain variable domain comprising SEQ ID NO: 559, and a heavy chain variable domain comprising SEQ ID NO: 577, SEQ ID NO: 578, SEQ ID NO: 579, SEQ ID NO: 580, SEQ ID NO: 581, SEQ ID NO: 582, SEQ ID NO: 583, SEQ ID NO: 584, SEQ ID NO: 585, SEQ ID NO: 586, SEQ ID NO: 587, SEQ ID NO: 588, SEQ ID NO: 589, SEQ ID NO: 590, SEQ ID NO: 591, SEQ ID NO: 592, SEQ ID NO: 593, SEQ ID NO: 594, SEQ ID NO: 595, SEQ ID NO: 596, SEQ ID NO: 597, SEQ ID NO: 598, SEQ ID NO: 599, SEQ ID NO: 600, SEQ ID NO: 601, SEQ ID NO: 602, SEQ ID NO: 603, SEQ ID NO: 604, SEQ ID NO: 605, SEQ ID NO: 606, SEQ ID NO: 607, SEQ ID NO: 608, SEQ ID NO: 609, SEQ ID NO: 610, SEQ ID NO: 611, SEQ ID NO: 612, SEQ ID NO: 613, SEQ ID NO: 614, SEQ ID NO: 615, SEQ ID NO: 616, SEQ ID NO: 617, SEQ ID NO: 618, SEQ ID NO: 619, SEQ ID NO: 620, SEQ ID NO: 621, SEQ ID NO: 622, SEQ ID NO: 623, SEQ ID NO: 624, SEQ ID NO: 625, SEQ ID NO: 626, SEQ ID NO: 627, SEQ ID NO: 628, SEQ ID NO: 629, SEQ ID NO: 630, SEQ ID NO: 631, SEQ ID NO: 632, SEQ ID NO: 633, SEQ ID NO: 634, SEQ ID NO: 635, SEQ ID NO: 636, SEQ ID NO: 637, SEQ ID NO: 638, SEQ ID NO: 639, SEQ ID NO: 640, SEQ ID NO: 641, SEQ ID NO: 642, SEQ ID NO: 643, SEQ ID NO: 644, SEQ ID NO: 645, SEQ ID NO: 646, SEQ ID NO: 647, SEQ ID NO: 648, SEQ ID NO: 649, SEQ ID NO: 650, SEQ ID NO: 651, SEQ ID NO: 652, SEQ ID NO: 653, SEQ ID NO: 654, SEQ ID NO: 655, SEQ ID NO: 656, SEQ ID NO: 657, SEQ ID NO: 658, SEQ ID NO: 659, SEQ ID NO: 660, SEQ ID NO: 661, SEQ ID NO: 662, SEQ ID NO: 663, SEQ ID NO: 664, SEQ ID NO: 665, SEQ ID NO: 666, SEQ ID NO: 667, SEQ ID NO: 668, SEQ ID NO: 669, SEQ ID NO: 670, SEQ ID NO: 671, SEQ ID NO: 672, SEQ ID NO: 673, SEQ ID NO: 674, SEQ ID NO: 675, SEQ ID NO: 676, SEQ ID NO: 677, SEQ ID NO: 678, SEQ ID NO: 679, SEQ ID NO: 680, SEQ ID NO: 681, SEQ ID NO: 682, SEQ ID NO: 683, SEQ ID NO: 684, SEQ ID NO: 685, SEQ ID NO: 686, SEQ ID NO: 687, SEQ ID NO: 688, SEQ ID NO: 689, SEQ ID NO: 690, SEQ ID NO: 691, SEQ ID NO: 692, SEQ ID NO: 693, SEQ ID NO: 694, SEQ ID NO: 695, or SEQ ID NO: 696.

[0640] In some examples of any of the ABPCs described herein, the first antigen-binding domain includes a light chain variable domain comprising SEQ ID NO: 560, and a heavy chain variable domain comprising SEQ ID NO: 577, SEQ ID NO: 578, SEQ ID NO: 579, SEQ ID NO: 580, SEQ ID NO: 581, SEQ ID NO: 582, SEQ ID NO: 583, SEQ ID NO: 584, SEQ ID NO: 585, SEQ ID NO: 586, SEQ ID NO: 587, SEQ ID NO: 588, SEQ ID NO: 589, SEQ ID NO: 590, SEQ ID NO: 591, SEQ ID NO: 592, SEQ ID NO: 593, SEQ ID NO: 594, SEQ ID NO: 595, SEQ ID NO: 596, SEQ ID NO: 597, SEQ ID NO: 598, SEQ ID NO: 599, SEQ ID NO: 600, SEQ ID NO: 601, SEQ ID NO: 602, SEQ ID NO: 603, SEQ ID NO: 604, SEQ ID NO: 605, SEQ ID NO: 606, SEQ ID NO: 607, SEQ ID NO: 608, SEQ ID NO: 609, SEQ ID NO: 610, SEQ ID NO: 611, SEQ ID NO: 612, SEQ ID NO: 613, SEQ ID NO: 614, SEQ ID NO: 615, SEQ ID NO: 616, SEQ ID NO: 617, SEQ ID NO: 618, SEQ ID NO: 619, SEQ ID NO: 620, SEQ ID NO: 621, SEQ ID NO: 622, SEQ ID NO: 623, SEQ ID NO: 624, SEQ ID NO: 625, SEQ ID NO: 626, SEQ ID NO: 627, SEQ ID NO: 628, SEQ ID NO: 629, SEQ ID NO: 630, SEQ ID NO: 631, SEQ ID NO: 632, SEQ ID NO: 633, SEQ ID NO: 634, SEQ ID NO: 635, SEQ ID NO: 636, SEQ ID NO: 637, SEQ ID NO: 638, SEQ ID NO: 639, SEQ ID NO: 640, SEQ ID NO: 641, SEQ ID NO: 642, SEQ ID NO: 643, SEQ ID NO: 644, SEQ ID NO: 645, SEQ ID NO: 646, SEQ ID NO: 647, SEQ ID NO: 648, SEQ ID NO: 649, SEQ ID NO: 650, SEQ ID NO: 651, SEQ ID NO: 652, SEQ ID NO: 653, SEQ ID NO: 654, SEQ ID NO: 655, SEQ ID NO: 656, SEQ ID NO: 657, SEQ ID NO: 658, SEQ ID NO: 659, SEQ ID NO: 660, SEQ ID NO: 661, SEQ ID NO: 662, SEQ ID NO: 663, SEQ ID NO: 664, SEQ ID NO: 665, SEQ ID NO: 666, SEQ ID NO: 667, SEQ ID NO: 668, SEQ ID NO: 669, SEQ ID NO: 670, SEQ ID NO: 671, SEQ ID NO: 672, SEQ ID NO: 673, SEQ ID NO: 674, SEQ ID NO: 675, SEQ ID NO: 676, SEQ ID NO: 677, SEQ ID NO: 678, SEQ ID NO: 679, SEQ ID NO: 680, SEQ ID NO: 681, SEQ ID NO: 682, SEQ ID NO: 683, SEQ ID NO: 684, SEQ ID NO: 685, SEQ ID NO: 686, SEQ ID NO: 687, SEQ ID NO: 688, SEQ ID NO: 689, SEQ ID NO: 690, SEQ ID NO: 691, SEQ ID NO: 692, SEQ ID NO: 693, SEQ ID NO: 694, SEQ ID NO: 695, or SEQ ID NO: 696.

[0641] In some examples of any of the ABPCs described herein, the first antigen-binding domain includes a light chain variable domain comprising SEQ ID NO: 561, and a heavy chain variable domain comprising SEQ ID NO: 577, SEQ ID NO: 578, SEQ ID NO: 579, SEQ ID NO: 580, SEQ ID NO: 581, SEQ ID NO: 582, SEQ ID NO: 583, SEQ ID NO: 584, SEQ ID NO: 585, SEQ ID NO: 586, SEQ ID NO: 587, SEQ ID NO: 588, SEQ ID NO: 589, SEQ ID NO: 590, SEQ ID NO: 591, SEQ ID NO: 592, SEQ ID NO: 593, SEQ ID NO: 594, SEQ ID NO: 595, SEQ ID NO: 596, SEQ ID NO: 597, SEQ ID NO: 598, SEQ ID NO: 599, SEQ ID NO: 600, SEQ ID NO: 601, SEQ ID NO: 602, SEQ ID NO: 603, SEQ ID NO: 604, SEQ ID NO: 605, SEQ ID NO: 606, SEQ ID NO: 607, SEQ ID NO: 608, SEQ ID NO: 609, SEQ ID NO: 610, SEQ ID NO: 611, SEQ ID NO: 612, SEQ ID NO: 613, SEQ ID NO: 614, SEQ ID NO: 615, SEQ ID NO: 616, SEQ ID NO: 617, SEQ ID NO: 618, SEQ ID NO: 619, SEQ ID NO: 620, SEQ ID NO: 621, SEQ ID NO: 622, SEQ ID NO: 623, SEQ ID NO: 624, SEQ ID NO: 625, SEQ ID NO: 626, SEQ ID NO: 627, SEQ ID NO: 628, SEQ ID NO: 629, SEQ ID NO: 630, SEQ ID NO: 631, SEQ ID NO: 632, SEQ ID NO: 633, SEQ ID NO: 634, SEQ ID NO: 635, SEQ ID NO: 636, SEQ ID NO: 637, SEQ ID NO: 638, SEQ ID NO: 639, SEQ ID NO: 640, SEQ ID NO: 641, SEQ ID NO: 642, SEQ ID NO: 643, SEQ ID NO: 644, SEQ ID NO: 645, SEQ ID NO: 646, SEQ ID NO: 647, SEQ ID NO: 648, SEQ ID NO: 649, SEQ ID NO: 650, SEQ ID NO: 651, SEQ ID NO: 652, SEQ ID NO: 653, SEQ ID NO: 654, SEQ ID NO: 655, SEQ ID NO: 656, SEQ ID NO: 657, SEQ ID NO: 658, SEQ ID NO: 659, SEQ ID NO: 660, SEQ ID NO: 661, SEQ ID NO: 662, SEQ ID NO: 663, SEQ ID NO: 664, SEQ ID NO: 665, SEQ ID NO: 666, SEQ ID NO: 667, SEQ ID NO: 668, SEQ ID NO: 669, SEQ ID NO: 670, SEQ ID NO: 671, SEQ ID NO: 672, SEQ ID NO: 673, SEQ ID NO: 674, SEQ ID NO: 675, SEQ ID NO: 676, SEQ ID NO: 677, SEQ ID NO: 678, SEQ ID NO: 679, SEQ ID NO: 680, SEQ ID NO: 681, SEQ ID NO: 682, SEQ ID NO: 683, SEQ ID NO: 684, SEQ ID NO: 685, SEQ ID NO: 686, SEQ ID NO: 687, SEQ ID NO: 688, SEQ ID NO: 689, SEQ ID NO: 690, SEQ ID NO: 691, SEQ ID NO: 692, SEQ ID NO: 693, SEQ ID NO: 694, SEQ ID NO: 695, or SEQ ID NO: 696.

[0642] In some examples of any of the ABPCs described herein, the first antigen-binding domain includes a light chain variable domain comprising SEQ ID NO: 562, and a heavy chain variable domain comprising SEQ ID NO: 577, SEQ ID NO: 578, SEQ ID NO: 579, SEQ ID NO: 580, SEQ ID NO: 581, SEQ ID NO: 582, SEQ ID NO: 583, SEQ ID NO: 584, SEQ ID NO: 585, SEQ ID NO: 586, SEQ ID NO: 587, SEQ ID NO: 588, SEQ ID NO: 589, SEQ ID NO: 590, SEQ ID NO: 591, SEQ ID NO: 592, SEQ ID NO: 593, SEQ ID NO: 594, SEQ ID NO: 595, SEQ ID NO: 596, SEQ ID NO: 597, SEQ ID NO: 598, SEQ ID NO: 599, SEQ ID NO: 600, SEQ ID NO: 601, SEQ ID NO: 602, SEQ ID NO: 603, SEQ ID NO: 604, SEQ ID NO: 605, SEQ ID NO: 606, SEQ ID NO: 607, SEQ ID NO: 608, SEQ ID NO: 609, SEQ ID NO: 610, SEQ ID NO: 611, SEQ ID NO: 612, SEQ ID NO: 613, SEQ ID NO: 614, SEQ ID NO: 615, SEQ ID NO: 616, SEQ ID NO: 617, SEQ ID NO: 618, SEQ ID NO: 619, SEQ ID NO: 620, SEQ ID NO: 621, SEQ ID NO: 622, SEQ ID NO: 623, SEQ ID NO: 624, SEQ ID NO: 625, SEQ ID NO: 626, SEQ ID NO: 627, SEQ ID NO: 628, SEQ ID NO: 629, SEQ ID NO: 630, SEQ ID NO: 631, SEQ ID NO: 632, SEQ ID NO: 633, SEQ ID NO: 634, SEQ ID NO: 635, SEQ ID NO: 636, SEQ ID NO: 637, SEQ ID NO: 638, SEQ ID NO: 639, SEQ ID NO: 640, SEQ ID NO: 641, SEQ ID NO: 642, SEQ ID NO: 643, SEQ ID NO: 644, SEQ ID NO: 645, SEQ ID NO: 646, SEQ ID NO: 647, SEQ ID NO: 648, SEQ ID NO: 649, SEQ ID NO: 650, SEQ ID NO: 651, SEQ ID NO: 652, SEQ ID NO: 653, SEQ ID NO: 654, SEQ ID NO: 655, SEQ ID NO: 656, SEQ ID NO: 657, SEQ ID NO: 658, SEQ ID NO: 659, SEQ ID NO: 660, SEQ ID NO: 661, SEQ ID NO: 662, SEQ ID NO: 663, SEQ ID NO: 664, SEQ ID NO: 665, SEQ ID NO: 666, SEQ ID NO: 667, SEQ ID NO: 668, SEQ ID NO: 669, SEQ ID NO: 670, SEQ ID NO: 671, SEQ ID NO: 672, SEQ ID NO: 673, SEQ ID NO: 674, SEQ ID NO: 675, SEQ ID NO: 676, SEQ ID NO: 677, SEQ ID NO: 678, SEQ ID NO: 679, SEQ ID NO: 680, SEQ ID NO: 681, SEQ ID NO: 682, SEQ ID NO: 683, SEQ ID NO: 684, SEQ ID NO: 685, SEQ ID NO: 686, SEQ ID NO: 687, SEQ ID NO: 688, SEQ ID NO: 689, SEQ ID NO: 690, SEQ ID NO: 691, SEQ ID NO: 692, SEQ ID NO: 693, SEQ ID NO: 694, SEQ ID NO: 695, or SEQ ID NO: 696.

[0643] In some examples of any of the ABPCs described herein, the first antigen-binding domain includes a light chain variable domain comprising SEQ ID NO: 563, and a heavy chain variable domain comprising SEQ ID NO: 577, SEQ ID NO: 578, SEQ ID NO: 579, SEQ ID NO: 580, SEQ ID NO: 581, SEQ ID NO: 582, SEQ ID NO: 583, SEQ ID NO: 584, SEQ ID NO: 585, SEQ ID NO: 586, SEQ ID NO: 587, SEQ ID NO: 588, SEQ ID NO: 589, SEQ ID NO: 590, SEQ ID NO: 591, SEQ ID NO: 592, SEQ ID NO: 593, SEQ ID NO: 594, SEQ ID NO: 595, SEQ ID NO: 596, SEQ ID NO: 597, SEQ ID NO: 598, SEQ ID NO: 599, SEQ ID NO: 600, SEQ ID NO: 601, SEQ ID NO: 602, SEQ ID NO: 603, SEQ ID NO: 604, SEQ ID NO: 605, SEQ ID NO: 606, SEQ ID NO: 607, SEQ ID NO: 608, SEQ ID NO: 609, SEQ ID NO: 610, SEQ ID NO: 611, SEQ ID NO: 612, SEQ ID NO: 613, SEQ ID NO: 614, SEQ ID NO: 615, SEQ ID NO: 616, SEQ ID NO: 617, SEQ ID NO: 618, SEQ ID NO: 619, SEQ ID NO: 620, SEQ ID NO: 621, SEQ ID NO: 622, SEQ ID NO: 623, SEQ ID NO: 624, SEQ ID NO: 625, SEQ ID NO: 626, SEQ ID NO: 627, SEQ ID NO: 628, SEQ ID NO: 629, SEQ ID NO: 630, SEQ ID NO: 631, SEQ ID NO: 632, SEQ ID NO: 633, SEQ ID NO: 634, SEQ ID NO: 635, SEQ ID NO: 636, SEQ ID NO: 637, SEQ ID NO: 638, SEQ ID NO: 639, SEQ ID NO: 640, SEQ ID NO: 641, SEQ ID NO: 642, SEQ ID NO: 643, SEQ ID NO: 644, SEQ ID NO: 645, SEQ ID NO: 646, SEQ ID NO: 647, SEQ ID NO: 648, SEQ ID NO: 649, SEQ ID NO: 650, SEQ ID NO: 651, SEQ ID NO: 652, SEQ ID NO: 653, SEQ ID NO: 654, SEQ ID NO: 655, SEQ ID NO: 656, SEQ ID NO: 657, SEQ ID NO: 658, SEQ ID NO: 659, SEQ ID NO: 660, SEQ ID NO: 661, SEQ ID NO: 662, SEQ ID NO: 663, SEQ ID NO: 664, SEQ ID NO: 665, SEQ ID NO: 666, SEQ ID NO: 667, SEQ ID NO: 668, SEQ ID NO: 669, SEQ ID NO: 670, SEQ ID NO: 671, SEQ ID NO: 672, SEQ ID NO: 673, SEQ ID NO: 674, SEQ ID NO: 675, SEQ ID NO: 676, SEQ ID NO: 677, SEQ ID NO: 678, SEQ ID NO: 679, SEQ ID NO: 680, SEQ ID NO: 681, SEQ ID NO: 682, SEQ ID NO: 683, SEQ ID NO: 684, SEQ ID NO: 685, SEQ ID NO: 686, SEQ ID NO: 687, SEQ ID NO: 688, SEQ ID NO: 689, SEQ ID NO: 690, SEQ ID NO: 691, SEQ ID NO: 692, SEQ ID NO: 693, SEQ ID NO: 694, SEQ ID NO: 695, or SEQ ID NO: 696.

[0644] In some examples of any of the ABPCs described herein, the first antigen-binding domain includes a light chain variable domain comprising SEQ ID NO: 564, and a heavy chain variable domain comprising SEQ ID NO: 577, SEQ ID NO: 578, SEQ ID NO: 579, SEQ ID NO: 580, SEQ ID NO: 581, SEQ ID NO: 582, SEQ ID NO: 583, SEQ ID NO: 584, SEQ ID NO: 585, SEQ ID NO: 586, SEQ ID NO: 587, SEQ ID NO: 588, SEQ ID NO: 589, SEQ ID NO: 590, SEQ ID NO: 591, SEQ ID NO: 592, SEQ ID NO: 593, SEQ ID NO: 594, SEQ ID NO: 595, SEQ ID NO: 596, SEQ ID NO: 597, SEQ ID NO: 598, SEQ ID NO: 599, SEQ ID NO: 600, SEQ ID NO: 601, SEQ ID NO: 602, SEQ ID NO: 603, SEQ ID NO: 604, SEQ ID NO: 605, SEQ ID NO: 606, SEQ ID NO: 607, SEQ ID NO: 608, SEQ ID NO: 609, SEQ ID NO: 610, SEQ ID NO: 611, SEQ ID NO: 612, SEQ ID NO: 613, SEQ ID NO: 614, SEQ ID NO: 615, SEQ ID NO: 616, SEQ ID NO: 617, SEQ ID NO: 618, SEQ ID NO: 619, SEQ ID NO: 620, SEQ ID NO: 621, SEQ ID NO: 622, SEQ ID NO: 623, SEQ ID NO: 624, SEQ ID NO: 625, SEQ ID NO: 626, SEQ ID NO: 627, SEQ ID NO: 628, SEQ ID NO: 629, SEQ ID NO: 630, SEQ ID NO: 631, SEQ ID NO: 632, SEQ ID NO: 633, SEQ ID NO: 634, SEQ ID NO: 635, SEQ ID NO: 636, SEQ ID NO: 637, SEQ ID NO: 638, SEQ ID NO: 639, SEQ ID NO: 640, SEQ ID NO: 641, SEQ ID NO: 642, SEQ ID NO: 643, SEQ ID NO: 644, SEQ ID NO: 645, SEQ ID NO: 646, SEQ ID NO: 647, SEQ ID NO: 648, SEQ ID NO: 649, SEQ ID NO: 650, SEQ ID NO: 651, SEQ ID NO: 652, SEQ ID NO: 653, SEQ ID NO: 654, SEQ ID NO: 655, SEQ ID NO: 656, SEQ ID NO: 657, SEQ ID NO: 658, SEQ ID NO: 659, SEQ ID NO: 660, SEQ ID NO: 661, SEQ ID NO: 662, SEQ ID NO: 663, SEQ ID NO: 664, SEQ ID NO: 665, SEQ ID NO: 666, SEQ ID NO: 667, SEQ ID NO: 668, SEQ ID NO: 669, SEQ ID NO: 670, SEQ ID NO: 671, SEQ ID NO: 672, SEQ ID NO: 673, SEQ ID NO: 674, SEQ ID NO: 675, SEQ ID NO: 676, SEQ ID NO: 677, SEQ ID NO: 678, SEQ ID NO: 679, SEQ ID NO: 680, SEQ ID NO: 681, SEQ ID NO: 682, SEQ ID NO: 683, SEQ ID NO: 684, SEQ ID NO: 685, SEQ ID NO: 686, SEQ ID NO: 687, SEQ ID NO: 688, SEQ ID NO: 689, SEQ ID NO: 690, SEQ ID NO: 691, SEQ ID NO: 692, SEQ ID NO: 693, SEQ ID NO: 694, SEQ ID NO: 695, or SEQ ID NO: 696.

[0645] In some examples of any of the ABPCs described herein, the first antigen-binding domain includes a light chain variable domain comprising SEQ ID NO: 565, and a heavy chain variable domain comprising SEQ ID NO: 577, SEQ ID NO: 578, SEQ ID NO: 579, SEQ ID NO: 580, SEQ ID NO: 581, SEQ ID NO: 582, SEQ ID NO: 583, SEQ ID NO: 584, SEQ ID NO: 585, SEQ ID NO: 586, SEQ ID NO: 587, SEQ ID NO: 588, SEQ ID NO: 589, SEQ ID NO: 590, SEQ ID NO: 591, SEQ ID NO: 592, SEQ ID NO: 593, SEQ ID NO: 594, SEQ ID NO: 595, SEQ ID NO: 596, SEQ ID NO: 597, SEQ ID NO: 598, SEQ ID NO: 599, SEQ ID NO: 600, SEQ ID NO: 601, SEQ ID NO: 602, SEQ ID NO: 603, SEQ ID NO: 604, SEQ ID NO: 605, SEQ ID NO: 606, SEQ ID NO: 607, SEQ ID NO: 608, SEQ ID NO: 609, SEQ ID NO: 610, SEQ ID NO: 611, SEQ ID NO: 612, SEQ ID NO: 613, SEQ ID NO: 614, SEQ ID NO: 615, SEQ ID NO: 616, SEQ ID NO: 617, SEQ ID NO: 618, SEQ ID NO: 619, SEQ ID NO: 620, SEQ ID NO: 621, SEQ ID NO: 622, SEQ ID NO: 623, SEQ ID NO: 624, SEQ ID NO: 625, SEQ ID NO: 626, SEQ ID NO: 627, SEQ ID NO: 628, SEQ ID NO: 629, SEQ ID NO: 630, SEQ ID NO: 631, SEQ ID NO: 632, SEQ ID NO: 633, SEQ ID NO: 634, SEQ ID NO: 635, SEQ ID NO: 636, SEQ ID NO: 637, SEQ ID NO: 638, SEQ ID NO: 639, SEQ ID NO: 640, SEQ ID NO: 641, SEQ ID NO: 642, SEQ ID NO: 643, SEQ ID NO: 644, SEQ ID NO: 645, SEQ ID NO: 646, SEQ ID NO: 647, SEQ ID NO: 648, SEQ ID NO: 649, SEQ ID NO: 650, SEQ ID NO: 651, SEQ ID NO: 652, SEQ ID NO: 653, SEQ ID NO: 654, SEQ ID NO: 655, SEQ ID NO: 656, SEQ ID NO: 657, SEQ ID NO: 658, SEQ ID NO: 659, SEQ ID NO: 660, SEQ ID NO: 661, SEQ ID NO: 662, SEQ ID NO: 663, SEQ ID NO: 664, SEQ ID NO: 665, SEQ ID NO: 666, SEQ ID NO: 667, SEQ ID NO: 668, SEQ ID NO: 669, SEQ ID NO: 670, SEQ ID NO: 671, SEQ ID NO: 672, SEQ ID NO: 673, SEQ ID NO: 674, SEQ ID NO: 675, SEQ ID NO: 676, SEQ ID NO: 677, SEQ ID NO: 678, SEQ ID NO: 679, SEQ ID NO: 680, SEQ ID NO: 681, SEQ ID NO: 682, SEQ ID NO: 683, SEQ ID NO: 684, SEQ ID NO: 685, SEQ ID NO: 686, SEQ ID NO: 687, SEQ ID NO: 688, SEQ ID NO: 689, SEQ ID NO: 690, SEQ ID NO: 691, SEQ ID NO: 692, SEQ ID NO: 693, SEQ ID NO: 694, SEQ ID NO: 695, or SEQ ID NO: 696.

[0646] In some examples of any of the ABPCs described herein, the first antigen-binding domain includes a light chain variable domain comprising SEQ ID NO: 566, and a heavy chain variable domain comprising SEQ ID NO: 577, SEQ ID NO: 578, SEQ ID NO: 579, SEQ ID NO: 580, SEQ ID NO: 581, SEQ ID NO: 582, SEQ ID NO: 583, SEQ ID NO: 584, SEQ ID NO: 585, SEQ ID NO: 586, SEQ ID NO: 587, SEQ ID NO: 588, SEQ ID NO: 589, SEQ ID NO: 590, SEQ ID NO: 591, SEQ ID NO: 592, SEQ ID NO: 593, SEQ ID NO: 594, SEQ ID NO: 595, SEQ ID NO: 596, SEQ ID NO: 597, SEQ ID NO: 598, SEQ ID NO: 599, SEQ ID NO: 600, SEQ ID NO: 601, SEQ ID NO: 602, SEQ ID NO: 603, SEQ ID NO: 604, SEQ ID NO: 605, SEQ ID NO: 606, SEQ ID NO: 607, SEQ ID NO: 608, SEQ ID NO: 609, SEQ ID NO: 610, SEQ ID NO: 611, SEQ ID NO: 612, SEQ ID NO: 613, SEQ ID NO: 614, SEQ ID NO: 615, SEQ ID NO: 616, SEQ ID NO: 617, SEQ ID NO: 618, SEQ ID NO: 619, SEQ ID NO: 620, SEQ ID NO: 621, SEQ ID NO: 622, SEQ ID NO: 623, SEQ ID NO: 624, SEQ ID NO: 625, SEQ ID NO: 626, SEQ ID NO: 627, SEQ ID NO: 628, SEQ ID NO: 629, SEQ ID NO: 630, SEQ ID NO: 631, SEQ ID NO: 632, SEQ ID NO: 633, SEQ ID NO: 634, SEQ ID NO: 635, SEQ ID NO: 636, SEQ ID NO: 637, SEQ ID NO: 638, SEQ ID NO: 639, SEQ ID NO: 640, SEQ ID NO: 641, SEQ ID NO: 642, SEQ ID NO: 643, SEQ ID NO: 644, SEQ ID NO: 645, SEQ ID NO: 646, SEQ ID NO: 647, SEQ ID NO: 648, SEQ ID NO: 649, SEQ ID NO: 650, SEQ ID NO: 651, SEQ ID NO: 652, SEQ ID NO: 653, SEQ ID NO: 654, SEQ ID NO: 655, SEQ ID NO: 656, SEQ ID NO: 657, SEQ ID NO: 658, SEQ ID NO: 659, SEQ ID NO: 660, SEQ ID NO: 661, SEQ ID NO: 662, SEQ ID NO: 663, SEQ ID NO: 664, SEQ ID NO: 665, SEQ ID NO: 666, SEQ ID NO: 667, SEQ ID NO: 668, SEQ ID NO: 669, SEQ ID NO: 670, SEQ ID NO: 671, SEQ ID NO: 672, SEQ ID NO: 673, SEQ ID NO: 674, SEQ ID NO: 675, SEQ ID NO: 676, SEQ ID NO: 677, SEQ ID NO: 678, SEQ ID NO: 679, SEQ ID NO: 680, SEQ ID NO: 681, SEQ ID NO: 682, SEQ ID NO: 683, SEQ ID NO: 684, SEQ ID NO: 685, SEQ ID NO: 686, SEQ ID NO: 687, SEQ ID NO: 688, SEQ ID NO: 689, SEQ ID NO: 690, SEQ ID NO: 691, SEQ ID NO: 692, SEQ ID NO: 693, SEQ ID NO: 694, SEQ ID NO: 695, or SEQ ID NO: 696.

[0647] In some examples of any of the ABPCs described herein, the first antigen-binding domain includes a light chain variable domain comprising SEQ ID NO: 567, and a heavy chain variable domain comprising SEQ ID NO: 577, SEQ ID NO: 578, SEQ ID NO: 579, SEQ ID NO: 580, SEQ ID NO: 581, SEQ ID NO: 582, SEQ ID NO: 583, SEQ ID NO: 584, SEQ ID NO: 585, SEQ ID NO: 586, SEQ ID NO: 587, SEQ ID NO: 588, SEQ ID NO: 589, SEQ ID NO: 590, SEQ ID NO: 591, SEQ ID NO: 592, SEQ ID NO: 593, SEQ ID NO: 594, SEQ ID NO: 595, SEQ ID NO: 596, SEQ ID NO: 597, SEQ ID NO: 598, SEQ ID NO: 599, SEQ ID NO: 600, SEQ ID NO: 601, SEQ ID NO: 602, SEQ ID NO: 603, SEQ ID NO: 604, SEQ ID NO: 605, SEQ ID NO: 606, SEQ ID NO: 607, SEQ ID NO: 608, SEQ ID NO: 609, SEQ ID NO: 610, SEQ ID NO: 611, SEQ ID NO: 612, SEQ ID NO: 613, SEQ ID NO: 614, SEQ ID NO: 615, SEQ ID NO: 616, SEQ ID NO: 617, SEQ ID NO: 618, SEQ ID NO: 619, SEQ ID NO: 620, SEQ ID NO: 621, SEQ ID NO: 622, SEQ ID NO: 623, SEQ ID NO: 624, SEQ ID NO: 625, SEQ ID NO: 626, SEQ ID NO: 627, SEQ ID NO: 628, SEQ ID NO: 629, SEQ ID NO: 630, SEQ ID NO: 631, SEQ ID NO: 632, SEQ ID NO: 633, SEQ ID NO: 634, SEQ ID NO: 635, SEQ ID NO: 636, SEQ ID NO: 637, SEQ ID NO: 638, SEQ ID NO: 639, SEQ ID NO: 640, SEQ ID NO: 641, SEQ ID NO: 642, SEQ ID NO: 643, SEQ ID NO: 644, SEQ ID NO: 645, SEQ ID NO: 646, SEQ ID NO: 647, SEQ ID NO: 648, SEQ ID NO: 649, SEQ ID NO: 650, SEQ ID NO: 651, SEQ ID NO: 652, SEQ ID NO: 653, SEQ ID NO: 654, SEQ ID NO: 655, SEQ ID NO: 656, SEQ ID NO: 657, SEQ ID NO: 658, SEQ ID NO: 659, SEQ ID NO: 660, SEQ ID NO: 661, SEQ ID NO: 662, SEQ ID NO: 663, SEQ ID NO: 664, SEQ ID NO: 665, SEQ ID NO: 666, SEQ ID NO: 667, SEQ ID NO: 668, SEQ ID NO: 669, SEQ ID NO: 670, SEQ ID NO: 671, SEQ ID NO: 672, SEQ ID NO: 673, SEQ ID NO: 674, SEQ ID NO: 675, SEQ ID NO: 676, SEQ ID NO: 677, SEQ ID NO: 678, SEQ ID NO: 679, SEQ ID NO: 680, SEQ ID NO: 681, SEQ ID NO: 682, SEQ ID NO: 683, SEQ ID NO: 684, SEQ ID NO: 685, SEQ ID NO: 686, SEQ ID NO: 687, SEQ ID NO: 688, SEQ ID NO: 689, SEQ ID NO: 690, SEQ ID NO: 691, SEQ ID NO: 692, SEQ ID NO: 693, SEQ ID NO: 694, SEQ ID NO: 695, or SEQ ID NO: 696.

[0648] In some examples of any of the ABPCs described herein, the first antigen-binding domain includes a light chain variable domain comprising SEQ ID NO: 568, and a heavy chain variable domain comprising SEQ ID NO: 577, SEQ ID NO: 578, SEQ ID NO: 579, SEQ ID NO: 580, SEQ ID NO: 581, SEQ ID NO: 582, SEQ ID NO: 583, SEQ ID NO: 584, SEQ ID NO: 585, SEQ ID NO: 586, SEQ ID NO: 587, SEQ ID NO: 588, SEQ ID NO: 589, SEQ ID NO: 590, SEQ ID NO: 591, SEQ ID NO: 592, SEQ ID NO: 593, SEQ ID NO: 594, SEQ ID NO: 595, SEQ ID NO: 596, SEQ ID NO: 597, SEQ ID NO: 598, SEQ ID NO: 599, SEQ ID NO: 600, SEQ ID NO: 601, SEQ ID NO: 602, SEQ ID NO: 603, SEQ ID NO: 604, SEQ ID NO: 605, SEQ ID NO: 606, SEQ ID NO: 607, SEQ ID NO: 608, SEQ ID NO: 609, SEQ ID NO: 610, SEQ ID NO: 611, SEQ ID NO: 612, SEQ ID NO: 613, SEQ ID NO: 614, SEQ ID NO: 615, SEQ ID NO: 616, SEQ ID NO: 617, SEQ ID NO: 618, SEQ ID NO: 619, SEQ ID NO: 620, SEQ ID NO: 621, SEQ ID NO: 622, SEQ ID NO: 623, SEQ ID NO: 624, SEQ ID NO: 625, SEQ ID NO: 626, SEQ ID NO: 627, SEQ ID NO: 628, SEQ ID NO: 629, SEQ ID NO: 630, SEQ ID NO: 631, SEQ ID NO: 632, SEQ ID NO: 633, SEQ ID NO: 634, SEQ ID NO: 635, SEQ ID NO: 636, SEQ ID NO: 637, SEQ ID NO: 638, SEQ ID NO: 639, SEQ ID NO: 640, SEQ ID NO: 641, SEQ ID NO: 642, SEQ ID NO: 643, SEQ ID NO: 644, SEQ ID NO: 645, SEQ ID NO: 646, SEQ ID NO: 647, SEQ ID NO: 648, SEQ ID NO: 649, SEQ ID NO: 650, SEQ ID NO: 651, SEQ ID NO: 652, SEQ ID NO: 653, SEQ ID NO: 654, SEQ ID NO: 655, SEQ ID NO: 656, SEQ ID NO: 657, SEQ ID NO: 658, SEQ ID NO: 659, SEQ ID NO: 660, SEQ ID NO: 661, SEQ ID NO: 662, SEQ ID NO: 663, SEQ ID NO: 664, SEQ ID NO: 665, SEQ ID NO: 666, SEQ ID NO: 667, SEQ ID NO: 668, SEQ ID NO: 669, SEQ ID NO: 670, SEQ ID NO: 671, SEQ ID NO: 672, SEQ ID NO: 673, SEQ ID NO: 674, SEQ ID NO: 675, SEQ ID NO: 676, SEQ ID NO: 677, SEQ ID NO: 678, SEQ ID NO: 679, SEQ ID NO: 680, SEQ ID NO: 681, SEQ ID NO: 682, SEQ ID NO: 683, SEQ ID NO: 684, SEQ ID NO: 685, SEQ ID NO: 686, SEQ ID NO: 687, SEQ ID NO: 688, SEQ ID NO: 689, SEQ ID NO: 690, SEQ ID NO: 691, SEQ ID NO: 692, SEQ ID NO: 693, SEQ ID NO: 694, SEQ ID NO: 695, or SEQ ID NO: 696.

[0649] In some examples of any of the ABPCs described herein, the first antigen-binding domain includes a light chain variable domain comprising SEQ ID NO: 569, and a heavy chain variable domain comprising SEQ ID NO: 577, SEQ ID NO: 578, SEQ ID NO: 579, SEQ ID NO: 580, SEQ ID NO: 581, SEQ ID NO: 582, SEQ ID NO: 583, SEQ ID NO: 584, SEQ ID NO: 585, SEQ ID NO: 586, SEQ ID NO: 587, SEQ ID NO: 588, SEQ ID NO: 589, SEQ ID NO: 590, SEQ ID NO: 591, SEQ ID NO: 592, SEQ ID NO: 593, SEQ ID NO: 594, SEQ ID NO: 595, SEQ ID NO: 596, SEQ ID NO: 597, SEQ ID NO: 598, SEQ ID NO: 599, SEQ ID NO: 600, SEQ ID NO: 601, SEQ ID NO: 602, SEQ ID NO: 603, SEQ ID NO: 604, SEQ ID NO: 605, SEQ ID NO: 606, SEQ ID NO: 607, SEQ ID NO: 608, SEQ ID NO: 609, SEQ ID NO: 610, SEQ ID NO: 611, SEQ ID NO: 612, SEQ ID NO: 613, SEQ ID NO: 614, SEQ ID NO: 615, SEQ ID NO: 616, SEQ ID NO: 617, SEQ ID NO: 618, SEQ ID NO: 619, SEQ ID NO: 620, SEQ ID NO: 621, SEQ ID NO: 622, SEQ ID NO: 623, SEQ ID NO: 624, SEQ ID NO: 625, SEQ ID NO: 626, SEQ ID NO: 627, SEQ ID NO: 628, SEQ ID NO: 629, SEQ ID NO: 630, SEQ ID NO: 631, SEQ ID NO: 632, SEQ ID NO: 633, SEQ ID NO: 634, SEQ ID NO: 635, SEQ ID NO: 636, SEQ ID NO: 637, SEQ ID NO: 638, SEQ ID NO: 639, SEQ ID NO: 640, SEQ ID NO: 641, SEQ ID NO: 642, SEQ ID NO: 643, SEQ ID NO: 644, SEQ ID NO: 645, SEQ ID NO: 646, SEQ ID NO: 647, SEQ ID NO: 648, SEQ ID NO: 649, SEQ ID NO: 650, SEQ ID NO: 651, SEQ ID NO: 652, SEQ ID NO: 653, SEQ ID NO: 654, SEQ ID NO: 655, SEQ ID NO: 656, SEQ ID NO: 657, SEQ ID NO: 658, SEQ ID NO: 659, SEQ ID NO: 660, SEQ ID NO: 661, SEQ ID NO: 662, SEQ ID NO: 663, SEQ ID NO: 664, SEQ ID NO: 665, SEQ ID NO: 666, SEQ ID NO: 667, SEQ ID NO: 668, SEQ ID NO: 669, SEQ ID NO: 670, SEQ ID NO: 671, SEQ ID NO: 672, SEQ ID NO: 673, SEQ ID NO: 674, SEQ ID NO: 675, SEQ ID NO: 676, SEQ ID NO: 677, SEQ ID NO: 678, SEQ ID NO: 679, SEQ ID NO: 680, SEQ ID NO: 681, SEQ ID NO: 682, SEQ ID NO: 683, SEQ ID NO: 684, SEQ ID NO: 685, SEQ ID NO: 686, SEQ ID NO: 687, SEQ ID NO: 688, SEQ ID NO: 689, SEQ ID NO: 690, SEQ ID NO: 691, SEQ ID NO: 692, SEQ ID NO: 693, SEQ ID NO: 694, SEQ ID NO: 695, or SEQ ID NO: 696.

[0650] In some examples of any of the ABPCs described herein, the first antigen-binding domain includes a light chain variable domain comprising SEQ ID NO: 570, and a heavy chain variable domain comprising SEQ ID NO: 577, SEQ ID NO: 578, SEQ ID NO: 579, SEQ ID NO: 580, SEQ ID NO: 581, SEQ ID NO: 582, SEQ ID NO: 583, SEQ ID NO: 584, SEQ ID NO: 585, SEQ ID NO: 586, SEQ ID NO: 587, SEQ ID NO: 588, SEQ ID NO: 589, SEQ ID NO: 590, SEQ ID NO: 591, SEQ ID NO: 592, SEQ ID NO: 593, SEQ ID NO: 594, SEQ ID NO: 595, SEQ ID NO: 596, SEQ ID NO: 597, SEQ ID NO: 598, SEQ ID NO: 599, SEQ ID NO: 600, SEQ ID NO: 601, SEQ ID NO: 602, SEQ ID NO: 603, SEQ ID NO: 604, SEQ ID NO: 605, SEQ ID NO: 606, SEQ ID NO: 607, SEQ ID NO: 608, SEQ ID NO: 609, SEQ ID NO: 610, SEQ ID NO: 611, SEQ ID NO: 612, SEQ ID NO: 613, SEQ ID NO: 614, SEQ ID NO: 615, SEQ ID NO: 616, SEQ ID NO: 617, SEQ ID NO: 618, SEQ ID NO: 619, SEQ ID NO: 620, SEQ ID NO: 621, SEQ ID NO: 622, SEQ ID NO: 623, SEQ ID NO: 624, SEQ ID NO: 625, SEQ ID NO: 626, SEQ ID NO: 627, SEQ ID NO: 628, SEQ ID NO: 629, SEQ ID NO: 630, SEQ ID NO: 631, SEQ ID NO: 632, SEQ ID NO: 633, SEQ ID NO: 634, SEQ ID NO: 635, SEQ ID NO: 636, SEQ ID NO: 637, SEQ ID NO: 638, SEQ ID NO: 639, SEQ ID NO: 640, SEQ ID NO: 641, SEQ ID NO: 642, SEQ ID NO: 643, SEQ ID NO: 644, SEQ ID NO: 645, SEQ ID NO: 646, SEQ ID NO: 647, SEQ ID NO: 648, SEQ ID NO: 649, SEQ ID NO: 650, SEQ ID NO: 651, SEQ ID NO: 652, SEQ ID NO: 653, SEQ ID NO: 654, SEQ ID NO: 655, SEQ ID NO: 656, SEQ ID NO: 657, SEQ ID NO: 658, SEQ ID NO: 659, SEQ ID NO: 660, SEQ ID NO: 661, SEQ ID NO: 662, SEQ ID NO: 663, SEQ ID NO: 664, SEQ ID NO: 665, SEQ ID NO: 666, SEQ ID NO: 667, SEQ ID NO: 668, SEQ ID NO: 669, SEQ ID NO: 670, SEQ ID NO: 671, SEQ ID NO: 672, SEQ ID NO: 673, SEQ ID NO: 674, SEQ ID NO: 675, SEQ ID NO: 676, SEQ ID NO: 677, SEQ ID NO: 678, SEQ ID NO: 679, SEQ ID NO: 680, SEQ ID NO: 681, SEQ ID NO: 682, SEQ ID NO: 683, SEQ ID NO: 684, SEQ ID NO: 685, SEQ ID NO: 686, SEQ ID NO: 687, SEQ ID NO: 688, SEQ ID NO: 689, SEQ ID NO: 690, SEQ ID NO: 691, SEQ ID NO: 692, SEQ ID NO: 693, SEQ ID NO: 694, SEQ ID NO: 695, or SEQ ID NO: 696.

[0651] In some examples of any of the ABPCs described herein, the first antigen-binding domain includes a light chain variable domain comprising SEQ ID NO: 571, and a heavy chain variable domain comprising SEQ ID NO: 577, SEQ ID NO: 578, SEQ ID NO: 579, SEQ ID NO: 580, SEQ ID NO: 581, SEQ ID NO: 582, SEQ ID NO: 583, SEQ ID NO: 584, SEQ ID NO: 585, SEQ ID NO: 586, SEQ ID NO: 587, SEQ ID NO: 588, SEQ ID NO: 589, SEQ ID NO: 590, SEQ ID NO: 591, SEQ ID NO: 592, SEQ ID NO: 593, SEQ ID NO: 594, SEQ ID NO: 595, SEQ ID NO: 596, SEQ ID NO: 597, SEQ ID NO: 598, SEQ ID NO: 599, SEQ ID NO: 600, SEQ ID NO: 601, SEQ ID NO: 602, SEQ ID NO: 603, SEQ ID NO: 604, SEQ ID NO: 605, SEQ ID NO: 606, SEQ ID NO: 607, SEQ ID NO: 608, SEQ ID NO: 609, SEQ ID NO: 610, SEQ ID NO: 611, SEQ ID NO: 612, SEQ ID NO: 613, SEQ ID NO: 614, SEQ ID NO: 615, SEQ ID NO: 616, SEQ ID NO: 617, SEQ ID NO: 618, SEQ ID NO: 619, SEQ ID NO: 620, SEQ ID NO: 621, SEQ ID NO: 622, SEQ ID NO: 623, SEQ ID NO: 624, SEQ ID NO: 625, SEQ ID NO: 626, SEQ ID NO: 627, SEQ ID NO: 628, SEQ ID NO: 629, SEQ ID NO: 630, SEQ ID NO: 631, SEQ ID NO: 632, SEQ ID NO: 633, SEQ ID NO: 634, SEQ ID NO: 635, SEQ ID NO: 636, SEQ ID NO: 637, SEQ ID NO: 638, SEQ ID NO: 639, SEQ ID NO: 640, SEQ ID NO: 641, SEQ ID NO: 642, SEQ ID NO: 643, SEQ ID NO: 644, SEQ ID NO: 645, SEQ ID NO: 646, SEQ ID NO: 647, SEQ ID NO: 648, SEQ ID NO: 649, SEQ ID NO: 650, SEQ ID NO: 651, SEQ ID NO: 652, SEQ ID NO: 653, SEQ ID NO: 654, SEQ ID NO: 655, SEQ ID NO: 656, SEQ ID NO: 657, SEQ ID NO: 658, SEQ ID NO: 659, SEQ ID NO: 660, SEQ ID NO: 661, SEQ ID NO: 662, SEQ ID NO: 663, SEQ ID NO: 664, SEQ ID NO: 665, SEQ ID NO: 666, SEQ ID NO: 667, SEQ ID NO: 668, SEQ ID NO: 669, SEQ ID NO: 670, SEQ ID NO: 671, SEQ ID NO: 672, SEQ ID NO: 673, SEQ ID NO: 674, SEQ ID NO: 675, SEQ ID NO: 676, SEQ ID NO: 677, SEQ ID NO: 678, SEQ ID NO: 679, SEQ ID NO: 680, SEQ ID NO: 681, SEQ ID NO: 682, SEQ ID NO: 683, SEQ ID NO: 684, SEQ ID NO: 685, SEQ ID NO: 686, SEQ ID NO: 687, SEQ ID NO: 688, SEQ ID NO: 689, SEQ ID NO: 690, SEQ ID NO: 691, SEQ ID NO: 692, SEQ ID NO: 693, SEQ ID NO: 694, SEQ ID NO: 695, or SEQ ID NO: 696.

[0652] In some examples of any of the ABPCs described herein, the first antigen-binding domain includes a light chain variable domain comprising SEQ ID NO: 572, and a heavy chain variable domain comprising SEQ ID NO: 577, SEQ ID NO: 578, SEQ ID NO: 579, SEQ ID NO: 580, SEQ ID NO: 581, SEQ ID NO: 582, SEQ ID NO: 583, SEQ ID NO: 584, SEQ ID NO: 585, SEQ ID NO: 586, SEQ ID NO: 587, SEQ ID NO: 588, SEQ ID NO: 589, SEQ ID NO: 590, SEQ ID NO: 591, SEQ ID NO: 592, SEQ ID NO: 593, SEQ ID NO: 594, SEQ ID NO: 595, SEQ ID NO: 596, SEQ ID NO: 597, SEQ ID NO: 598, SEQ ID NO: 599, SEQ ID NO: 600, SEQ ID NO: 601, SEQ ID NO: 602, SEQ ID NO: 603, SEQ ID NO: 604, SEQ ID NO: 605, SEQ ID NO: 606, SEQ ID NO: 607, SEQ ID NO: 608, SEQ ID NO: 609, SEQ ID NO: 610, SEQ ID NO: 611, SEQ ID NO: 612, SEQ ID NO: 613, SEQ ID NO: 614, SEQ ID NO: 615, SEQ ID NO: 616, SEQ ID NO: 617, SEQ ID NO: 618, SEQ ID NO: 619, SEQ ID NO: 620, SEQ ID NO: 621, SEQ ID NO: 622, SEQ ID NO: 623, SEQ ID NO: 624, SEQ ID NO: 625, SEQ ID NO: 626, SEQ ID NO: 627, SEQ ID NO: 628, SEQ ID NO: 629, SEQ ID NO: 630, SEQ ID NO: 631, SEQ ID NO: 632, SEQ ID NO: 633, SEQ ID NO: 634, SEQ ID NO: 635, SEQ ID NO: 636, SEQ ID NO: 637, SEQ ID NO: 638, SEQ ID NO: 639, SEQ ID NO: 640, SEQ ID NO: 641, SEQ ID NO: 642, SEQ ID NO: 643, SEQ ID NO: 644, SEQ ID NO: 645, SEQ ID NO: 646, SEQ ID NO: 647, SEQ ID NO: 648, SEQ ID NO: 649, SEQ ID NO: 650, SEQ ID NO: 651, SEQ ID NO: 652, SEQ ID NO: 653, SEQ ID NO: 654, SEQ ID NO: 655, SEQ ID NO: 656, SEQ ID NO: 657, SEQ ID NO: 658, SEQ ID NO: 659, SEQ ID NO: 660, SEQ ID NO: 661, SEQ ID NO: 662, SEQ ID NO: 663, SEQ ID NO: 664, SEQ ID NO: 665, SEQ ID NO: 666, SEQ ID NO: 667, SEQ ID NO: 668, SEQ ID NO: 669, SEQ ID NO: 670, SEQ ID NO: 671, SEQ ID NO: 672, SEQ ID NO: 673, SEQ ID NO: 674, SEQ ID NO: 675, SEQ ID NO: 676, SEQ ID NO: 677, SEQ ID NO: 678, SEQ ID NO: 679, SEQ ID NO: 680, SEQ ID NO: 681, SEQ ID NO: 682, SEQ ID NO: 683, SEQ ID NO: 684, SEQ ID NO: 685, SEQ ID NO: 686, SEQ ID NO: 687, SEQ ID NO: 688, SEQ ID NO: 689, SEQ ID NO: 690, SEQ ID NO: 691, SEQ ID NO: 692, SEQ ID NO: 693, SEQ ID NO: 694, SEQ ID NO: 695, or SEQ ID NO: 696.

[0653] In some examples of any of the ABPCs described herein, the first antigen-binding domain includes a light chain variable domain comprising SEQ ID NO: 573, and a heavy chain variable domain comprising SEQ ID NO: 577, SEQ ID NO: 578, SEQ ID NO: 579, SEQ ID NO: 580, SEQ ID NO: 581, SEQ ID NO: 582, SEQ ID NO: 583, SEQ ID NO: 584, SEQ ID NO: 585, SEQ ID NO: 586, SEQ ID NO: 587, SEQ ID NO: 588, SEQ ID NO: 589, SEQ ID NO: 590, SEQ ID NO: 591, SEQ ID NO: 592, SEQ ID NO: 593, SEQ ID NO: 594, SEQ ID NO: 595, SEQ ID NO: 596, SEQ ID NO: 597, SEQ ID NO: 598, SEQ ID NO: 599, SEQ ID NO: 600, SEQ ID NO: 601, SEQ ID NO: 602, SEQ ID NO: 603, SEQ ID NO: 604, SEQ ID NO: 605, SEQ ID NO: 606, SEQ ID NO: 607, SEQ ID NO: 608, SEQ ID NO: 609, SEQ ID NO: 610, SEQ ID NO: 611, SEQ ID NO: 612, SEQ ID NO: 613, SEQ ID NO: 614, SEQ ID NO: 615, SEQ ID NO: 616, SEQ ID NO: 617, SEQ ID NO: 618, SEQ ID NO: 619, SEQ ID NO: 620, SEQ ID NO: 621, SEQ ID NO: 622, SEQ ID NO: 623, SEQ ID NO: 624, SEQ ID NO: 625, SEQ ID NO: 626, SEQ ID NO: 627, SEQ ID NO: 628, SEQ ID NO: 629, SEQ ID NO: 630, SEQ ID NO: 631, SEQ ID NO: 632, SEQ ID NO: 633, SEQ ID NO: 634, SEQ ID NO: 635, SEQ ID NO: 636, SEQ ID NO: 637, SEQ ID NO: 638, SEQ ID NO: 639, SEQ ID NO: 640, SEQ ID NO: 641, SEQ ID NO: 642, SEQ ID NO: 643, SEQ ID NO: 644, SEQ ID NO: 645, SEQ ID NO: 646, SEQ ID NO: 647, SEQ ID NO: 648, SEQ ID NO: 649, SEQ ID NO: 650, SEQ ID NO: 651, SEQ ID NO: 652, SEQ ID NO: 653, SEQ ID NO: 654, SEQ ID NO: 655, SEQ ID NO: 656, SEQ ID NO: 657, SEQ ID NO: 658, SEQ ID NO: 659, SEQ ID NO: 660, SEQ ID NO: 661, SEQ ID NO: 662, SEQ ID NO: 663, SEQ ID NO: 664, SEQ ID NO: 665, SEQ ID NO: 666, SEQ ID NO: 667, SEQ ID NO: 668, SEQ ID NO: 669, SEQ ID NO: 670, SEQ ID NO: 671, SEQ ID NO: 672, SEQ ID NO: 673, SEQ ID NO: 674, SEQ ID NO: 675, SEQ ID NO: 676, SEQ ID NO: 677, SEQ ID NO: 678, SEQ ID NO: 679, SEQ ID NO: 680, SEQ ID NO: 681, SEQ ID NO: 682, SEQ ID NO: 683, SEQ ID NO: 684, SEQ ID NO: 685, SEQ ID NO: 686, SEQ ID NO: 687, SEQ ID NO: 688, SEQ ID NO: 689, SEQ ID NO: 690, SEQ ID NO: 691, SEQ ID NO: 692, SEQ ID NO: 693, SEQ ID NO: 694, SEQ ID NO: 695, or SEQ ID NO: 696.

[0654] In some examples of any of the ABPCs described herein, the first antigen-binding domain includes a light chain variable domain comprising SEQ ID NO: 574, and a heavy chain variable domain comprising SEQ ID NO: 577, SEQ ID NO: 578, SEQ ID NO: 579, SEQ ID NO: 580, SEQ ID NO: 581, SEQ ID NO: 582, SEQ ID NO: 583, SEQ ID NO: 584, SEQ ID NO: 585, SEQ ID NO: 586, SEQ ID NO: 587, SEQ ID NO: 588, SEQ ID NO: 589, SEQ ID NO: 590, SEQ ID NO: 591, SEQ ID NO: 592, SEQ ID NO: 593, SEQ ID NO: 594, SEQ ID NO: 595, SEQ ID NO: 596, SEQ ID NO: 597, SEQ ID NO: 598, SEQ ID NO: 599, SEQ ID NO: 600, SEQ ID NO: 601, SEQ ID NO: 602, SEQ ID NO: 603, SEQ ID NO: 604, SEQ ID NO: 605, SEQ ID NO: 606, SEQ ID NO: 607, SEQ ID NO: 608, SEQ ID NO: 609, SEQ ID NO: 610, SEQ ID NO: 611, SEQ ID NO: 612, SEQ ID NO: 613, SEQ ID NO: 614, SEQ ID NO: 615, SEQ ID NO: 616, SEQ ID NO: 617, SEQ ID NO: 618, SEQ ID NO: 619, SEQ ID NO: 620, SEQ ID NO: 621, SEQ ID NO: 622, SEQ ID NO: 623, SEQ ID NO: 624, SEQ ID NO: 625, SEQ ID NO: 626, SEQ ID NO: 627, SEQ ID NO: 628, SEQ ID NO: 629, SEQ ID NO: 630, SEQ ID NO: 631, SEQ ID NO: 632, SEQ ID NO: 633, SEQ ID NO: 634, SEQ ID NO: 635, SEQ ID NO: 636, SEQ ID NO: 637, SEQ ID NO: 638, SEQ ID NO: 639, SEQ ID NO: 640, SEQ ID NO: 641, SEQ ID NO: 642, SEQ ID NO: 643, SEQ ID NO: 644, SEQ ID NO: 645, SEQ ID NO: 646, SEQ ID NO: 647, SEQ ID NO: 648, SEQ ID NO: 649, SEQ ID NO: 650, SEQ ID NO: 651, SEQ ID NO: 652, SEQ ID NO: 653, SEQ ID NO: 654, SEQ ID NO: 655, SEQ ID NO: 656, SEQ ID NO: 657, SEQ ID NO: 658, SEQ ID NO: 659, SEQ ID NO: 660, SEQ ID NO: 661, SEQ ID NO: 662, SEQ ID NO: 663, SEQ ID NO: 664, SEQ ID NO: 665, SEQ ID NO: 666, SEQ ID NO: 667, SEQ ID NO: 668, SEQ ID NO: 669, SEQ ID NO: 670, SEQ ID NO: 671, SEQ ID NO: 672, SEQ ID NO: 673, SEQ ID NO: 674, SEQ ID NO: 675, SEQ ID NO: 676, SEQ ID NO: 677, SEQ ID NO: 678, SEQ ID NO: 679, SEQ ID NO: 680, SEQ ID NO: 681, SEQ ID NO: 682, SEQ ID NO: 683, SEQ ID NO: 684, SEQ ID NO: 685, SEQ ID NO: 686, SEQ ID NO: 687, SEQ ID NO: 688, SEQ ID NO: 689, SEQ ID NO: 690, SEQ ID NO: 691, SEQ ID NO: 692, SEQ ID NO: 693, SEQ ID NO: 694, SEQ ID NO: 695, or SEQ ID NO: 696.

[0655] In some examples of any of the ABPCs described herein, the first antigen-binding domain includes a light chain variable domain comprising SEQ ID NO: 575, and a heavy chain variable domain comprising SEQ ID NO: 577, SEQ ID NO: 578, SEQ ID NO: 579, SEQ ID NO: 580, SEQ ID NO: 581, SEQ ID NO: 582, SEQ ID NO: 583, SEQ ID NO: 584, SEQ ID NO: 585, SEQ ID NO: 586, SEQ ID NO: 587, SEQ ID NO: 588, SEQ ID NO: 589, SEQ ID NO: 590, SEQ ID NO: 591, SEQ ID NO: 592, SEQ ID NO: 593, SEQ ID NO: 594, SEQ ID NO: 595, SEQ ID NO: 596, SEQ ID NO: 597, SEQ ID NO: 598, SEQ ID NO: 599, SEQ ID NO: 600, SEQ ID NO: 601, SEQ ID NO: 602, SEQ ID NO: 603, SEQ ID NO: 604, SEQ ID NO: 605, SEQ ID NO: 606, SEQ ID NO: 607, SEQ ID NO: 608, SEQ ID NO: 609, SEQ ID NO: 610, SEQ ID NO: 611, SEQ ID NO: 612, SEQ ID NO: 613, SEQ ID NO: 614, SEQ ID NO: 615, SEQ ID NO: 616, SEQ ID NO: 617, SEQ ID NO: 618, SEQ ID NO: 619, SEQ ID NO: 620, SEQ ID NO: 621, SEQ ID NO: 622, SEQ ID NO: 623, SEQ ID NO: 624, SEQ ID NO: 625, SEQ ID NO: 626, SEQ ID NO: 627, SEQ ID NO: 628, SEQ ID NO: 629, SEQ ID NO: 630, SEQ ID NO: 631, SEQ ID NO: 632, SEQ ID NO: 633, SEQ ID NO: 634, SEQ ID NO: 635, SEQ ID NO: 636, SEQ ID NO: 637, SEQ ID NO: 638, SEQ ID NO: 639, SEQ ID NO: 640, SEQ ID NO: 641, SEQ ID NO: 642, SEQ ID NO: 643, SEQ ID NO: 644, SEQ ID NO: 645, SEQ ID NO: 646, SEQ ID NO: 647, SEQ ID NO: 648, SEQ ID NO: 649, SEQ ID NO: 650, SEQ ID NO: 651, SEQ ID NO: 652, SEQ ID NO: 653, SEQ ID NO: 654, SEQ ID NO: 655, SEQ ID NO: 656, SEQ ID NO: 657, SEQ ID NO: 658, SEQ ID NO: 659, SEQ ID NO: 660, SEQ ID NO: 661, SEQ ID NO: 662, SEQ ID NO: 663, SEQ ID NO: 664, SEQ ID NO: 665, SEQ ID NO: 666, SEQ ID NO: 667, SEQ ID NO: 668, SEQ ID NO: 669, SEQ ID NO: 670, SEQ ID NO: 671, SEQ ID NO: 672, SEQ ID NO: 673, SEQ ID NO: 674, SEQ ID NO: 675, SEQ ID NO: 676, SEQ ID NO: 677, SEQ ID NO: 678, SEQ ID NO: 679, SEQ ID NO: 680, SEQ ID NO: 681, SEQ ID NO: 682, SEQ ID NO: 683, SEQ ID NO: 684, SEQ ID NO: 685, SEQ ID NO: 686, SEQ ID NO: 687, SEQ ID NO: 688, SEQ ID NO: 689, SEQ ID NO: 690, SEQ ID NO: 691, SEQ ID NO: 692, SEQ ID NO: 693, SEQ ID NO: 694, SEQ ID NO: 695, or SEQ ID NO: 696.

[0656] In some examples of any of the ABPCs described herein, the first antigen-binding domain includes a light chain variable domain comprising SEQ ID NO: 576, and a heavy chain variable domain comprising SEQ ID NO: 577, SEQ ID NO: 578, SEQ ID NO: 579, SEQ ID NO: 580, SEQ ID NO: 581, SEQ ID NO: 582, SEQ ID NO: 583, SEQ ID NO: 584, SEQ ID NO: 585, SEQ ID NO: 586, SEQ ID NO: 587, SEQ ID NO: 588, SEQ ID NO: 589, SEQ ID NO: 590, SEQ ID NO: 591, SEQ ID NO: 592, SEQ ID NO: 593, SEQ ID NO: 594, SEQ ID NO: 595, SEQ ID NO: 596, SEQ ID NO: 597, SEQ ID NO: 598, SEQ ID NO: 599, SEQ ID NO: 600, SEQ ID NO: 601, SEQ ID NO: 602, SEQ ID NO: 603, SEQ ID NO: 604, SEQ ID NO: 605, SEQ ID NO: 606, SEQ ID NO: 607, SEQ ID NO: 608, SEQ ID NO: 609, SEQ ID NO: 610, SEQ ID NO: 611, SEQ ID NO: 612, SEQ ID NO: 613, SEQ ID NO: 614, SEQ ID NO: 615, SEQ ID NO: 616, SEQ ID NO: 617, SEQ ID NO: 618, SEQ ID NO: 619, SEQ ID NO: 620, SEQ ID NO: 621, SEQ ID NO: 622, SEQ ID NO: 623, SEQ ID NO: 624, SEQ ID NO: 625, SEQ ID NO: 626, SEQ ID NO: 627, SEQ ID NO: 628, SEQ ID NO: 629, SEQ ID NO: 630, SEQ ID NO: 631, SEQ ID NO: 632, SEQ ID NO: 633, SEQ ID NO: 634, SEQ ID NO: 635, SEQ ID NO: 636, SEQ ID NO: 637, SEQ ID NO: 638, SEQ ID NO: 639, SEQ ID NO: 640, SEQ ID NO: 641, SEQ ID NO: 642, SEQ ID NO: 643, SEQ ID NO: 644, SEQ ID NO: 645, SEQ ID NO: 646, SEQ ID NO: 647, SEQ ID NO: 648, SEQ ID NO: 649, SEQ ID NO: 650, SEQ ID NO: 651, SEQ ID NO: 652, SEQ ID NO: 653, SEQ ID NO: 654, SEQ ID NO: 655, SEQ ID NO: 656, SEQ ID NO: 657, SEQ ID NO: 658, SEQ ID NO: 659, SEQ ID NO: 660, SEQ ID NO: 661, SEQ ID NO: 662, SEQ ID NO: 663, SEQ ID NO: 664, SEQ ID NO: 665, SEQ ID NO: 666, SEQ ID NO: 667, SEQ ID NO: 668, SEQ ID NO: 669, SEQ ID NO: 670, SEQ ID NO: 671, SEQ ID NO: 672, SEQ ID NO: 673, SEQ ID NO: 674, SEQ ID NO: 675, SEQ ID NO: 676, SEQ ID NO: 677, SEQ ID NO: 678, SEQ ID NO: 679, SEQ ID NO: 680, SEQ ID NO: 681, SEQ ID NO: 682, SEQ ID NO: 683, SEQ ID NO: 684, SEQ ID NO: 685, SEQ ID NO: 686, SEQ ID NO: 687, SEQ ID NO: 688, SEQ ID NO: 689, SEQ ID NO: 690, SEQ ID NO: 691, SEQ ID NO: 692, SEQ ID NO: 693, SEQ ID NO: 694, SEQ ID NO: 695, or SEQ ID NO: 696.

[0657] In some examples of any of the ABPCs described herein, the first antigen-binding domain includes a light chain variable domain comprising: SEQ ID NO: 697, SEQ ID NO: 698, SEQ ID NO: 699, SEQ ID NO: 700, SEQ ID NO: 701, SEQ ID NO: 702, SEQ ID NO: 703, SEQ ID NO: 704, SEQ ID NO: 705, SEQ ID NO: 706, SEQ ID NO: 707, SEQ ID NO: 708, SEQ ID NO: 709, SEQ ID NO: 710, SEQ ID NO: 711, SEQ ID NO: 712, SEQ ID NO: 713, SEQ ID NO: 714, SEQ ID NO: 715, SEQ ID NO: 716, SEQ ID NO: 717, SEQ ID NO: 718, SEQ ID NO: 719, SEQ ID NO: 720, SEQ ID NO: 721, SEQ ID NO: 722, SEQ ID NO: 723, SEQ ID NO: 724, SEQ ID NO: 725, SEQ ID NO: 726, SEQ ID NO: 727, SEQ ID NO: 728, SEQ ID NO: 729, SEQ ID NO: 730, SEQ ID NO: 731, SEQ ID NO: 732, SEQ ID NO: 733, SEQ ID NO: 734, SEQ ID NO: 735, SEQ ID NO: 736, SEQ ID NO: 737, SEQ ID NO: 738, SEQ ID NO: 739, SEQ ID NO: 740, SEQ ID NO: 741, SEQ ID NO: 742, SEQ ID NO: 743, SEQ ID NO: 744, SEQ ID NO: 745, SEQ ID NO: 746, SEQ ID NO: 747, SEQ ID NO: 748, SEQ ID NO: 749, SEQ ID NO: 750, SEQ ID NO: 751, SEQ ID NO: 752, SEQ ID NO: 753, SEQ ID NO: 754, SEQ ID NO: 755, SEQ ID NO: 756, SEQ ID NO: 757, SEQ ID NO: 758, SEQ ID NO: 759, SEQ ID NO: 760, SEQ ID NO: 761, SEQ ID NO: 762, SEQ ID NO: 763, SEQ ID NO: 764, SEQ ID NO: 765, SEQ ID NO: 766, SEQ ID NO: 767, SEQ ID NO: 768, SEQ ID NO: 769, SEQ ID NO: 770, SEQ ID NO: 771, SEQ ID NO: 772, SEQ ID NO: 773, SEQ ID NO: 774, SEQ ID NO: 775, SEQ ID NO: 776, SEQ ID NO: 777, SEQ ID NO: 778, SEQ ID NO: 779, SEQ ID NO: 780, SEQ ID NO: 781, SEQ ID NO: 782, SEQ ID NO: 783, SEQ ID NO: 784, SEQ ID NO: 785, SEQ ID NO: 786, SEQ ID NO: 787, SEQ ID NO: 788, SEQ ID NO: 789, or SEQ ID NO: 790.

[0658] In some examples of any of the ABPCs described herein, the first antigen-binding domain includes a light chain variable domain comprising SEQ ID NO: 503, and a heavy chain variable domain comprising: SEQ ID NO: 510, SEQ ID NO: 511, SEQ ID NO: 512, SEQ ID NO: 513, SEQ ID NO: 514, SEQ ID NO: 515, SEQ ID NO: 516, SEQ ID NO: 517, SEQ ID NO: 518, SEQ ID NO: 519, SEQ ID NO: 520, SEQ ID NO: 521, SEQ ID NO: 522, SEQ ID NO: 523, SEQ ID NO: 524, SEQ ID NO: 525, SEQ ID NO: 526, SEQ ID NO: 527, SEQ ID NO: 528, SEQ ID NO: 529, SEQ ID NO: 530, SEQ ID NO: 531, SEQ ID NO: 532, SEQ ID NO: 533, SEQ ID NO: 534, SEQ ID NO: 535, SEQ ID NO: 536, SEQ ID NO: 537, SEQ ID NO: 538, SEQ ID NO: 539, SEQ ID NO: 540, SEQ ID NO: 541, SEQ ID NO: 542, SEQ ID NO: 543, SEQ ID NO: 544, SEQ ID NO: 545, SEQ ID NO: 546, SEQ ID NO: 547, SEQ ID NO: 548, SEQ ID NO: 577, SEQ ID NO: 578, SEQ ID NO: 579, SEQ ID NO: 580, SEQ ID NO: 581, SEQ ID NO: 582, SEQ ID NO: 583, SEQ ID NO: 584, SEQ ID NO: 585, SEQ ID NO: 586, SEQ ID NO: 587, SEQ ID NO: 588, SEQ ID NO: 589, SEQ ID NO: 590, SEQ ID NO: 591, SEQ ID NO: 592, SEQ ID NO: 593, SEQ ID NO: 594, SEQ ID NO: 595, SEQ ID NO: 596, SEQ ID NO: 597, SEQ ID NO: 598, SEQ ID NO: 599, SEQ ID NO: 600, SEQ ID NO: 601, SEQ ID NO: 602, SEQ ID NO: 603, SEQ ID NO: 604, SEQ ID NO: 605, SEQ ID NO: 606, SEQ ID NO: 607, SEQ ID NO: 608, SEQ ID NO: 609, SEQ ID NO: 610, SEQ ID NO: 611, SEQ ID NO: 612, SEQ ID NO: 613, SEQ ID NO: 614, SEQ ID NO: 615, SEQ ID NO: 616, SEQ ID NO: 617, SEQ ID NO: 618, SEQ ID NO: 619, SEQ ID NO: 620, SEQ ID NO: 621, SEQ ID NO: 622, SEQ ID NO: 623, SEQ ID NO: 624, SEQ ID NO: 625, SEQ ID NO: 626, SEQ ID NO: 627, SEQ ID NO: 628, SEQ ID NO: 629, SEQ ID NO: 630, SEQ ID NO: 631, SEQ ID NO: 632, SEQ ID NO: 633, SEQ ID NO: 634, SEQ ID NO: 635, SEQ ID NO: 636, SEQ ID NO: 637, SEQ ID NO: 638, SEQ ID NO: 639, SEQ ID NO: 640, SEQ ID NO: 641, SEQ ID NO: 642, SEQ ID NO: 643, SEQ ID NO: 644, SEQ ID NO: 645, SEQ ID NO: 646, SEQ ID NO: 647, SEQ ID NO: 648, SEQ ID NO: 649, SEQ ID NO: 650, SEQ ID NO: 651, SEQ ID NO: 652, SEQ ID NO: 653, SEQ ID NO: 654, SEQ ID NO: 655, SEQ ID NO: 656, SEQ ID NO: 657, SEQ ID NO: 658, SEQ ID NO: 659, SEQ ID NO: 660, SEQ ID NO: 661, SEQ ID NO: 662, SEQ ID NO: 663, SEQ ID NO: 664, SEQ ID NO: 665, SEQ ID NO: 666, SEQ ID NO: 667, SEQ ID NO: 668, SEQ ID NO: 669, SEQ ID NO: 670, SEQ ID NO: 671, SEQ ID NO: 672, SEQ ID NO: 673, SEQ ID NO: 674, SEQ ID NO: 675, SEQ ID NO: 676, SEQ ID NO: 677, SEQ ID NO: 678, SEQ ID NO: 679, SEQ ID NO: 680, SEQ ID NO: 681, SEQ ID NO: 682, SEQ ID NO: 683, SEQ ID NO: 684, SEQ ID NO: 685, SEQ ID NO: 686, SEQ ID NO: 687, SEQ ID NO: 688, SEQ ID NO: 689, SEQ ID NO: 690, SEQ ID NO: 691, SEQ ID NO: 692, SEQ ID NO: 693, SEQ ID NO: 694, SEQ ID NO: 695, or SEQ ID NO: 696.

[0659] In some examples of any of the ABPCs described herein, the first antigen-binding domain includes a light chain variable domain comprising SEQ ID NO: 697, and a heavy chain variable domain comprising: SEQ ID NO: 502, SEQ ID NO: 510, SEQ ID NO: 511, SEQ ID NO: 512, SEQ ID NO: 513, SEQ ID NO: 514, SEQ ID NO: 515, SEQ ID NO: 516, SEQ ID NO: 517, SEQ ID NO: 518, SEQ ID NO: 519, SEQ ID NO: 520, SEQ ID NO: 521, SEQ ID NO: 522, SEQ ID NO: 523, SEQ ID NO: 524, SEQ ID NO: 525, SEQ ID NO: 526, SEQ ID NO: 527, SEQ ID NO: 528, SEQ ID NO: 529, SEQ ID NO: 530, SEQ ID NO: 531, SEQ ID NO: 532, SEQ ID NO: 533, SEQ ID NO: 534, SEQ ID NO: 535, SEQ ID NO: 536, SEQ ID NO: 537, SEQ ID NO: 538, SEQ ID NO: 539, SEQ ID NO: 540, SEQ ID NO: 541, SEQ ID NO: 542, SEQ ID NO: 543, SEQ ID NO: 544, SEQ ID NO: 545, SEQ ID NO: 546, SEQ ID NO: 547, SEQ ID NO: 548, SEQ ID NO: 577, SEQ ID NO: 578, SEQ ID NO: 579, SEQ ID NO: 580, SEQ ID NO: 581, SEQ ID NO: 582, SEQ ID NO: 583, SEQ ID NO: 584, SEQ ID NO: 585, SEQ ID NO: 586, SEQ ID NO: 587, SEQ ID NO: 588, SEQ ID NO: 589, SEQ ID NO: 590, SEQ ID NO: 591, SEQ ID NO: 592, SEQ ID NO: 593, SEQ ID NO: 594, SEQ ID NO: 595, SEQ ID NO: 596, SEQ ID NO: 597, SEQ ID NO: 598, SEQ ID NO: 599, SEQ ID NO: 600, SEQ ID NO: 601, SEQ ID NO: 602, SEQ ID NO: 603, SEQ ID NO: 604, SEQ ID NO: 605, SEQ ID NO: 606, SEQ ID NO: 607, SEQ ID NO: 608, SEQ ID NO: 609, SEQ ID NO: 610, SEQ ID NO: 611, SEQ ID NO: 612, SEQ ID NO: 613, SEQ ID NO: 614, SEQ ID NO: 615, SEQ ID NO: 616, SEQ ID NO: 617, SEQ ID NO: 618, SEQ ID NO: 619, SEQ ID NO: 620, SEQ ID NO: 621, SEQ ID NO: 622, SEQ ID NO: 623, SEQ ID NO: 624, SEQ ID NO: 625, SEQ ID NO: 626, SEQ ID NO: 627, SEQ ID NO: 628, SEQ ID NO: 629, SEQ ID NO: 630, SEQ ID NO: 631, SEQ ID NO: 632, SEQ ID NO: 633, SEQ ID NO: 634, SEQ ID NO: 635, SEQ ID NO: 636, SEQ ID NO: 637, SEQ ID NO: 638, SEQ ID NO: 639, SEQ ID NO: 640, SEQ ID NO: 641, SEQ ID NO: 642, SEQ ID NO: 643, SEQ ID NO: 644, SEQ ID NO: 645, SEQ ID NO: 646, SEQ ID NO: 647, SEQ ID NO: 648, SEQ ID NO: 649, SEQ ID NO: 650, SEQ ID NO: 651, SEQ ID NO: 652, SEQ ID NO: 653, SEQ ID NO: 654, SEQ ID NO: 655, SEQ ID NO: 656, SEQ ID NO: 657, SEQ ID NO: 658, SEQ ID NO: 659, SEQ ID NO: 660, SEQ ID NO: 661, SEQ ID NO: 662, SEQ ID NO: 663, SEQ ID NO: 664, SEQ ID NO: 665, SEQ ID NO: 666, SEQ ID NO: 667, SEQ ID NO: 668, SEQ ID NO: 669, SEQ ID NO: 670, SEQ ID NO: 671, SEQ ID NO: 672, SEQ ID NO: 673, SEQ ID NO: 674, SEQ ID NO: 675, SEQ ID NO: 676, SEQ ID NO: 677, SEQ ID NO: 678, SEQ ID NO: 679, SEQ ID NO: 680, SEQ ID NO: 681, SEQ ID NO: 682, SEQ ID NO: 683, SEQ ID NO: 684, SEQ ID NO: 685, SEQ ID NO: 686, SEQ ID NO: 687, SEQ ID NO: 688, SEQ ID NO: 689, SEQ ID NO: 690, SEQ ID NO: 691, SEQ ID NO: 692, SEQ ID NO: 693, SEQ ID NO: 694, SEQ ID NO: 695, or SEQ ID NO: 696.

[0660] In some examples of any of the ABPCs described herein, the first antigen-binding domain includes a light chain variable domain comprising SEQ ID NO: 698, and a heavy chain variable domain comprising: SEQ ID NO: 502, SEQ ID NO: 510, SEQ ID NO: 511, SEQ ID NO: 512, SEQ ID NO: 513, SEQ ID NO: 514, SEQ ID NO: 515, SEQ ID NO: 516, SEQ ID NO: 517, SEQ ID NO: 518, SEQ ID NO: 519, SEQ ID NO: 520, SEQ ID NO: 521, SEQ ID NO: 522, SEQ ID NO: 523, SEQ ID NO: 524, SEQ ID NO: 525, SEQ ID NO: 526, SEQ ID NO: 527, SEQ ID NO: 528, SEQ ID NO: 529, SEQ ID NO: 530, SEQ ID NO: 531, SEQ ID NO: 532, SEQ ID NO: 533, SEQ ID NO: 534, SEQ ID NO: 535, SEQ ID NO: 536, SEQ ID NO: 537, SEQ ID NO: 538, SEQ ID NO: 539, SEQ ID NO: 540, SEQ ID NO: 541, SEQ ID NO: 542, SEQ ID NO: 543, SEQ ID NO: 544, SEQ ID NO: 545, SEQ ID NO: 546, SEQ ID NO: 547, SEQ ID NO: 548, SEQ ID NO: 577, SEQ ID NO: 578, SEQ ID NO: 579, SEQ ID NO: 580, SEQ ID NO: 581, SEQ ID NO: 582, SEQ ID NO: 583, SEQ ID NO: 584, SEQ ID NO: 585, SEQ ID NO: 586, SEQ ID NO: 587, SEQ ID NO: 588, SEQ ID NO: 589, SEQ ID NO: 590, SEQ ID NO: 591, SEQ ID NO: 592, SEQ ID NO: 593, SEQ ID NO: 594, SEQ ID NO: 595, SEQ ID NO: 596, SEQ ID NO: 597, SEQ ID NO: 598, SEQ ID NO: 599, SEQ ID NO: 600, SEQ ID NO: 601, SEQ ID NO: 602, SEQ ID NO: 603, SEQ ID NO: 604, SEQ ID NO: 605, SEQ ID NO: 606, SEQ ID NO: 607, SEQ ID NO: 608, SEQ ID NO: 609, SEQ ID NO: 610, SEQ ID NO: 611, SEQ ID NO: 612, SEQ ID NO: 613, SEQ ID NO: 614, SEQ ID NO: 615, SEQ ID NO: 616, SEQ ID NO: 617, SEQ ID NO: 618, SEQ ID NO: 619, SEQ ID NO: 620, SEQ ID NO: 621, SEQ ID NO: 622, SEQ ID NO: 623, SEQ ID NO: 624, SEQ ID NO: 625, SEQ ID NO: 626, SEQ ID NO: 627, SEQ ID NO: 628, SEQ ID NO: 629, SEQ ID NO: 630, SEQ ID NO: 631, SEQ ID NO: 632, SEQ ID NO: 633, SEQ ID NO: 634, SEQ ID NO: 635, SEQ ID NO: 636, SEQ ID NO: 637, SEQ ID NO: 638, SEQ ID NO: 639, SEQ ID NO: 640, SEQ ID NO: 641, SEQ ID NO: 642, SEQ ID NO: 643, SEQ ID NO: 644, SEQ ID NO: 645, SEQ ID NO: 646, SEQ ID NO: 647, SEQ ID NO: 648, SEQ ID NO: 649, SEQ ID NO: 650, SEQ ID NO: 651, SEQ ID NO: 652, SEQ ID NO: 653, SEQ ID NO: 654, SEQ ID NO: 655, SEQ ID NO: 656, SEQ ID NO: 657, SEQ ID NO: 658, SEQ ID NO: 659, SEQ ID NO: 660, SEQ ID NO: 661, SEQ ID NO: 662, SEQ ID NO: 663, SEQ ID NO: 664, SEQ ID NO: 665, SEQ ID NO: 666, SEQ ID NO: 667, SEQ ID NO: 668, SEQ ID NO: 669, SEQ ID NO: 670, SEQ ID NO: 671, SEQ ID NO: 672, SEQ ID NO: 673, SEQ ID NO: 674, SEQ ID NO: 675, SEQ ID NO: 676, SEQ ID NO: 677, SEQ ID NO: 678, SEQ ID NO: 679, SEQ ID NO: 680, SEQ ID NO: 681, SEQ ID NO: 682, SEQ ID NO: 683, SEQ ID NO: 684, SEQ ID NO: 685, SEQ ID NO: 686, SEQ ID NO: 687, SEQ ID NO: 688, SEQ ID NO: 689, SEQ ID NO: 690, SEQ ID NO: 691, SEQ ID NO: 692, SEQ ID NO: 693, SEQ ID NO: 694, SEQ ID NO: 695, or SEQ ID NO: 696.

[0661] In some examples of any of the ABPCs described herein, the first antigen-binding domain includes a light chain variable domain comprising SEQ ID NO: 699, and a heavy chain variable domain comprising: SEQ ID NO: 502, SEQ ID NO: 510, SEQ ID NO: 511, SEQ ID NO: 512, SEQ ID NO: 513, SEQ ID NO: 514, SEQ ID NO: 515, SEQ ID NO: 516, SEQ ID NO: 517, SEQ ID NO: 518, SEQ ID NO: 519, SEQ ID NO: 520, SEQ ID NO: 521, SEQ ID NO: 522, SEQ ID NO: 523, SEQ ID NO: 524, SEQ ID NO: 525, SEQ ID NO: 526, SEQ ID NO: 527, SEQ ID NO: 528, SEQ ID NO: 529, SEQ ID NO: 530, SEQ ID NO: 531, SEQ ID NO: 532, SEQ ID NO: 533, SEQ ID NO: 534, SEQ ID NO: 535, SEQ ID NO: 536, SEQ ID NO: 537, SEQ ID NO: 538, SEQ ID NO: 539, SEQ ID NO: 540, SEQ ID NO: 541, SEQ ID NO: 542, SEQ ID NO: 543, SEQ ID NO: 544, SEQ ID NO: 545, SEQ ID NO: 546, SEQ ID NO: 547, SEQ ID NO: 548, SEQ ID NO: 577, SEQ ID NO: 578, SEQ ID NO: 579, SEQ ID NO: 580, SEQ ID NO: 581, SEQ ID NO: 582, SEQ ID NO: 583, SEQ ID NO: 584, SEQ ID NO: 585, SEQ ID NO: 586, SEQ ID NO: 587, SEQ ID NO: 588, SEQ ID NO: 589, SEQ ID NO: 590, SEQ ID NO: 591, SEQ ID NO: 592, SEQ ID NO: 593, SEQ ID NO: 594, SEQ ID NO: 595, SEQ ID NO: 596, SEQ ID NO: 597, SEQ ID NO: 598, SEQ ID NO: 599, SEQ ID NO: 600, SEQ ID NO: 601, SEQ ID NO: 602, SEQ ID NO: 603, SEQ ID NO: 604, SEQ ID NO: 605, SEQ ID NO: 606, SEQ ID NO: 607, SEQ ID NO: 608, SEQ ID NO: 609, SEQ ID NO: 610, SEQ ID NO: 611, SEQ ID NO: 612, SEQ ID NO: 613, SEQ ID NO: 614, SEQ ID NO: 615, SEQ ID NO: 616, SEQ ID NO: 617, SEQ ID NO: 618, SEQ ID NO: 619, SEQ ID NO: 620, SEQ ID NO: 621, SEQ ID NO: 622, SEQ ID NO: 623, SEQ ID NO: 624, SEQ ID NO: 625, SEQ ID NO: 626, SEQ ID NO: 627, SEQ ID NO: 628, SEQ ID NO: 629, SEQ ID NO: 630, SEQ ID NO: 631, SEQ ID NO: 632, SEQ ID NO: 633, SEQ ID NO: 634, SEQ ID NO: 635, SEQ ID NO: 636, SEQ ID NO: 637, SEQ ID NO: 638, SEQ ID NO: 639, SEQ ID NO: 640, SEQ ID NO: 641, SEQ ID NO: 642, SEQ ID NO: 643, SEQ ID NO: 644, SEQ ID NO: 645, SEQ ID NO: 646, SEQ ID NO: 647, SEQ ID NO: 648, SEQ ID NO: 649, SEQ ID NO: 650, SEQ ID NO: 651, SEQ ID NO: 652, SEQ ID NO: 653, SEQ ID NO: 654, SEQ ID NO: 655, SEQ ID NO: 656, SEQ ID NO: 657, SEQ ID NO: 658, SEQ ID NO: 659, SEQ ID NO: 660, SEQ ID NO: 661, SEQ ID NO: 662, SEQ ID NO: 663, SEQ ID NO: 664, SEQ ID NO: 665, SEQ ID NO: 666, SEQ ID NO: 667, SEQ ID NO: 668, SEQ ID NO: 669, SEQ ID NO: 670, SEQ ID NO: 671, SEQ ID NO: 672, SEQ ID NO: 673, SEQ ID NO: 674, SEQ ID NO: 675, SEQ ID NO: 676, SEQ ID NO: 677, SEQ ID NO: 678, SEQ ID NO: 679, SEQ ID NO: 680, SEQ ID NO: 681, SEQ ID NO: 682, SEQ ID NO: 683, SEQ ID NO: 684, SEQ ID NO: 685, SEQ ID NO: 686, SEQ ID NO: 687, SEQ ID NO: 688, SEQ ID NO: 689, SEQ ID NO: 690, SEQ ID NO: 691, SEQ ID NO: 692, SEQ ID NO: 693, SEQ ID NO: 694, SEQ ID NO: 695, or SEQ ID NO: 696.

[0662] In some examples of any of the ABPCs described herein, the first antigen-binding domain includes a light chain variable domain comprising SEQ ID NO: 700, and a heavy chain variable domain comprising: SEQ ID NO: 502, SEQ ID NO: 510, SEQ ID NO: 511, SEQ ID NO: 512, SEQ ID NO: 513, SEQ ID NO: 514, SEQ ID NO: 515, SEQ ID NO: 516, SEQ ID NO: 517, SEQ ID NO: 518, SEQ ID NO: 519, SEQ ID NO: 520, SEQ ID NO: 521, SEQ ID NO: 522, SEQ ID NO: 523, SEQ ID NO: 524, SEQ ID NO: 525, SEQ ID NO: 526, SEQ ID NO: 527, SEQ ID NO: 528, SEQ ID NO: 529, SEQ ID NO: 530, SEQ ID NO: 531, SEQ ID NO: 532, SEQ ID NO: 533, SEQ ID NO: 534, SEQ ID NO: 535, SEQ ID NO: 536, SEQ ID NO: 537, SEQ ID NO: 538, SEQ ID NO: 539, SEQ ID NO: 540, SEQ ID NO: 541, SEQ ID NO: 542, SEQ ID NO: 543, SEQ ID NO: 544, SEQ ID NO: 545, SEQ ID NO: 546, SEQ ID NO: 547, SEQ ID NO: 548, SEQ ID NO: 577, SEQ ID NO: 578, SEQ ID NO: 579, SEQ ID NO: 580, SEQ ID NO: 581, SEQ ID NO: 582, SEQ ID NO: 583, SEQ ID NO: 584, SEQ ID NO: 585, SEQ ID NO: 586, SEQ ID NO: 587, SEQ ID NO: 588, SEQ ID NO: 589, SEQ ID NO: 590, SEQ ID NO: 591, SEQ ID NO: 592, SEQ ID NO: 593, SEQ ID NO: 594, SEQ ID NO: 595, SEQ ID NO: 596, SEQ ID NO: 597, SEQ ID NO: 598, SEQ ID NO: 599, SEQ ID NO: 600, SEQ ID NO: 601, SEQ ID NO: 602, SEQ ID NO: 603, SEQ ID NO: 604, SEQ ID NO: 605, SEQ ID NO: 606, SEQ ID NO: 607, SEQ ID NO: 608, SEQ ID NO: 609, SEQ ID NO: 610, SEQ ID NO: 611, SEQ ID NO: 612, SEQ ID NO: 613, SEQ ID NO: 614, SEQ ID NO: 615, SEQ ID NO: 616, SEQ ID NO: 617, SEQ ID NO: 618, SEQ ID NO: 619, SEQ ID NO: 620, SEQ ID NO: 621, SEQ ID NO: 622, SEQ ID NO: 623, SEQ ID NO: 624, SEQ ID NO: 625, SEQ ID NO: 626, SEQ ID NO: 627, SEQ ID NO: 628, SEQ ID NO: 629, SEQ ID NO: 630, SEQ ID NO: 631, SEQ ID NO: 632, SEQ ID NO: 633, SEQ ID NO: 634, SEQ ID NO: 635, SEQ ID NO: 636, SEQ ID NO: 637, SEQ ID NO: 638, SEQ ID NO: 639, SEQ ID NO: 640, SEQ ID NO: 641, SEQ ID NO: 642, SEQ ID NO: 643, SEQ ID NO: 644, SEQ ID NO: 645, SEQ ID NO: 646, SEQ ID NO: 647, SEQ ID NO: 648, SEQ ID NO: 649, SEQ ID NO: 650, SEQ ID NO: 651, SEQ ID NO: 652, SEQ ID NO: 653, SEQ ID NO: 654, SEQ ID NO: 655, SEQ ID NO: 656, SEQ ID NO: 657, SEQ ID NO: 658, SEQ ID NO: 659, SEQ ID NO: 660, SEQ ID NO: 661, SEQ ID NO: 662, SEQ ID NO: 663, SEQ ID NO: 664, SEQ ID NO: 665, SEQ ID NO: 666, SEQ ID NO: 667, SEQ ID NO: 668, SEQ ID NO: 669, SEQ ID NO: 670, SEQ ID NO: 671, SEQ ID NO: 672, SEQ ID NO: 673, SEQ ID NO: 674, SEQ ID NO: 675, SEQ ID NO: 676, SEQ ID NO: 677, SEQ ID NO: 678, SEQ ID NO: 679, SEQ ID NO: 680, SEQ ID NO: 681, SEQ ID NO: 682, SEQ ID NO: 683, SEQ ID NO: 684, SEQ ID NO: 685, SEQ ID NO: 686, SEQ ID NO: 687, SEQ ID NO: 688, SEQ ID NO: 689, SEQ ID NO: 690, SEQ ID NO: 691, SEQ ID NO: 692, SEQ ID NO: 693, SEQ ID NO: 694, SEQ ID NO: 695, or SEQ ID NO: 696.

[0663] In some examples of any of the ABPCs described herein, the first antigen-binding domain includes a light chain variable domain comprising SEQ ID NO: 701, and a heavy chain variable domain comprising: SEQ ID NO: 502, SEQ ID NO: 510, SEQ ID NO: 511, SEQ ID NO: 512, SEQ ID NO: 513, SEQ ID NO: 514, SEQ ID NO: 515, SEQ ID NO: 516, SEQ ID NO: 517, SEQ ID NO: 518, SEQ ID NO: 519, SEQ ID NO: 520, SEQ ID NO: 521, SEQ ID NO: 522, SEQ ID NO: 523, SEQ ID NO: 524, SEQ ID NO: 525, SEQ ID NO: 526, SEQ ID NO: 527, SEQ ID NO: 528, SEQ ID NO: 529, SEQ ID NO: 530, SEQ ID NO: 531, SEQ ID NO: 532, SEQ ID NO: 533, SEQ ID NO: 534, SEQ ID NO: 535, SEQ ID NO: 536, SEQ ID NO: 537, SEQ ID NO: 538, SEQ ID NO: 539, SEQ ID NO: 540, SEQ ID NO: 541, SEQ ID NO: 542, SEQ ID NO: 543, SEQ ID NO: 544, SEQ ID NO: 545, SEQ ID NO: 546, SEQ ID NO: 547, SEQ ID NO: 548, SEQ ID NO: 577, SEQ ID NO: 578, SEQ ID NO: 579, SEQ ID NO: 580, SEQ ID NO: 581, SEQ ID NO: 582, SEQ ID NO: 583, SEQ ID NO: 584, SEQ ID NO: 585, SEQ ID NO: 586, SEQ ID NO: 587, SEQ ID NO: 588, SEQ ID NO: 589, SEQ ID NO: 590, SEQ ID NO: 591, SEQ ID NO: 592, SEQ ID NO: 593, SEQ ID NO: 594, SEQ ID NO: 595, SEQ ID NO: 596, SEQ ID NO: 597, SEQ ID NO: 598, SEQ ID NO: 599, SEQ ID NO: 600, SEQ ID NO: 601, SEQ ID NO: 602, SEQ ID NO: 603, SEQ ID NO: 604, SEQ ID NO: 605, SEQ ID NO: 606, SEQ ID NO: 607, SEQ ID NO: 608, SEQ ID NO: 609, SEQ ID NO: 610, SEQ ID NO: 611, SEQ ID NO: 612, SEQ ID NO: 613, SEQ ID NO: 614, SEQ ID NO: 615, SEQ ID NO: 616, SEQ ID NO: 617, SEQ ID NO: 618, SEQ ID NO: 619, SEQ ID NO: 620, SEQ ID NO: 621, SEQ ID NO: 622, SEQ ID NO: 623, SEQ ID NO: 624, SEQ ID NO: 625, SEQ ID NO: 626, SEQ ID NO: 627, SEQ ID NO: 628, SEQ ID NO: 629, SEQ ID NO: 630, SEQ ID NO: 631, SEQ ID NO: 632, SEQ ID NO: 633, SEQ ID NO: 634, SEQ ID NO: 635, SEQ ID NO: 636, SEQ ID NO: 637, SEQ ID NO: 638, SEQ ID NO: 639, SEQ ID NO: 640, SEQ ID NO: 641, SEQ ID NO: 642, SEQ ID NO: 643, SEQ ID NO: 644, SEQ ID NO: 645, SEQ ID NO: 646, SEQ ID NO: 647, SEQ ID NO: 648, SEQ ID NO: 649, SEQ ID NO: 650, SEQ ID NO: 651, SEQ ID NO: 652, SEQ ID NO: 653, SEQ ID NO: 654, SEQ ID NO: 655, SEQ ID NO: 656, SEQ ID NO: 657, SEQ ID NO: 658, SEQ ID NO: 659, SEQ ID NO: 660, SEQ ID NO: 661, SEQ ID NO: 662, SEQ ID NO: 663, SEQ ID NO: 664, SEQ ID NO: 665, SEQ ID NO: 666, SEQ ID NO: 667, SEQ ID NO: 668, SEQ ID NO: 669, SEQ ID NO: 670, SEQ ID NO: 671, SEQ ID NO: 672, SEQ ID NO: 673, SEQ ID NO: 674, SEQ ID NO: 675, SEQ ID NO: 676, SEQ ID NO: 677, SEQ ID NO: 678, SEQ ID NO: 679, SEQ ID NO: 680, SEQ ID NO: 681, SEQ ID NO: 682, SEQ ID NO: 683, SEQ ID NO: 684, SEQ ID NO: 685, SEQ ID NO: 686, SEQ ID NO: 687, SEQ ID NO: 688, SEQ ID NO: 689, SEQ ID NO: 690, SEQ ID NO: 691, SEQ ID NO: 692, SEQ ID NO: 693, SEQ ID NO: 694, SEQ ID NO: 695, or SEQ ID NO: 696.

[0664] In some examples of any of the ABPCs described herein, the first antigen-binding domain includes a light chain variable domain comprising SEQ ID NO: 702, and a heavy chain variable domain comprising: SEQ ID NO: 502, SEQ ID NO: 510, SEQ ID NO: 511, SEQ ID NO: 512, SEQ ID NO: 513, SEQ ID NO: 514, SEQ ID NO: 515, SEQ ID NO: 516, SEQ ID NO: 517, SEQ ID NO: 518, SEQ ID NO: 519, SEQ ID NO: 520, SEQ ID NO: 521, SEQ ID NO: 522, SEQ ID NO: 523, SEQ ID NO: 524, SEQ ID NO: 525, SEQ ID NO: 526, SEQ ID NO: 527, SEQ ID NO: 528, SEQ ID NO: 529, SEQ ID NO: 530, SEQ ID NO: 531, SEQ ID NO: 532, SEQ ID NO: 533, SEQ ID NO: 534, SEQ ID NO: 535, SEQ ID NO: 536, SEQ ID NO: 537, SEQ ID NO: 538, SEQ ID NO: 539, SEQ ID NO: 540, SEQ ID NO: 541, SEQ ID NO: 542, SEQ ID NO: 543, SEQ ID NO: 544, SEQ ID NO: 545, SEQ ID NO: 546, SEQ ID NO: 547, SEQ ID NO: 548, SEQ ID NO: 577, SEQ ID NO: 578, SEQ ID NO: 579, SEQ ID NO: 580, SEQ ID NO: 581, SEQ ID NO: 582, SEQ ID NO: 583, SEQ ID NO: 584, SEQ ID NO: 585, SEQ ID NO: 586, SEQ ID NO: 587, SEQ ID NO: 588, SEQ ID NO: 589, SEQ ID NO: 590, SEQ ID NO: 591, SEQ ID NO: 592, SEQ ID NO: 593, SEQ ID NO: 594, SEQ ID NO: 595, SEQ ID NO: 596, SEQ ID NO: 597, SEQ ID NO: 598, SEQ ID NO: 599, SEQ ID NO: 600, SEQ ID NO: 601, SEQ ID NO: 602, SEQ ID NO: 603, SEQ ID NO: 604, SEQ ID NO: 605, SEQ ID NO: 606, SEQ ID NO: 607, SEQ ID NO: 608, SEQ ID NO: 609, SEQ ID NO: 610, SEQ ID NO: 611, SEQ ID NO: 612, SEQ ID NO: 613, SEQ ID NO: 614, SEQ ID NO: 615, SEQ ID NO: 616, SEQ ID NO: 617, SEQ ID NO: 618, SEQ ID NO: 619, SEQ ID NO: 620, SEQ ID NO: 621, SEQ ID NO: 622, SEQ ID NO: 623, SEQ ID NO: 624, SEQ ID NO: 625, SEQ ID NO: 626, SEQ ID NO: 627, SEQ ID NO: 628, SEQ ID NO: 629, SEQ ID NO: 630, SEQ ID NO: 631, SEQ ID NO: 632, SEQ ID NO: 633, SEQ ID NO: 634, SEQ ID NO: 635, SEQ ID NO: 636, SEQ ID NO: 637, SEQ ID NO: 638, SEQ ID NO: 639, SEQ ID NO: 640, SEQ ID NO: 641, SEQ ID NO: 642, SEQ ID NO: 643, SEQ ID NO: 644, SEQ ID NO: 645, SEQ ID NO: 646, SEQ ID NO: 647, SEQ ID NO: 648, SEQ ID NO: 649, SEQ ID NO: 650, SEQ ID NO: 651, SEQ ID NO: 652, SEQ ID NO: 653, SEQ ID NO: 654, SEQ ID NO: 655, SEQ ID NO: 656, SEQ ID NO: 657, SEQ ID NO: 658, SEQ ID NO: 659, SEQ ID NO: 660, SEQ ID NO: 661, SEQ ID NO: 662, SEQ ID NO: 663, SEQ ID NO: 664, SEQ ID NO: 665, SEQ ID NO: 666, SEQ ID NO: 667, SEQ ID NO: 668, SEQ ID NO: 669, SEQ ID NO: 670, SEQ ID NO: 671, SEQ ID NO: 672, SEQ ID NO: 673, SEQ ID NO: 674, SEQ ID NO: 675, SEQ ID NO: 676, SEQ ID NO: 677, SEQ ID NO: 678, SEQ ID NO: 679, SEQ ID NO: 680, SEQ ID NO: 681, SEQ ID NO: 682, SEQ ID NO: 683, SEQ ID NO: 684, SEQ ID NO: 685, SEQ ID NO: 686, SEQ ID NO: 687, SEQ ID NO: 688, SEQ ID NO: 689, SEQ ID NO: 690, SEQ ID NO: 691, SEQ ID NO: 692, SEQ ID NO: 693, SEQ ID NO: 694, SEQ ID NO: 695, or SEQ ID NO: 696.

[0665] In some examples of any of the ABPCs described herein, the first antigen-binding domain includes a light chain variable domain comprising SEQ ID NO: 703, and a heavy chain variable domain comprising: SEQ ID NO: 502, SEQ ID NO: 510, SEQ ID NO: 511, SEQ ID NO: 512, SEQ ID NO: 513, SEQ ID NO: 514, SEQ ID NO: 515, SEQ ID NO: 516, SEQ ID NO: 517, SEQ ID NO: 518, SEQ ID NO: 519, SEQ ID NO: 520, SEQ ID NO: 521, SEQ ID NO: 522, SEQ ID NO: 523, SEQ ID NO: 524, SEQ ID NO: 525, SEQ ID NO: 526, SEQ ID NO: 527, SEQ ID NO: 528, SEQ ID NO: 529, SEQ ID NO: 530, SEQ ID NO: 531, SEQ ID NO: 532, SEQ ID NO: 533, SEQ ID NO: 534, SEQ ID NO: 535, SEQ ID NO: 536, SEQ ID NO: 537, SEQ ID NO: 538, SEQ ID NO: 539, SEQ ID NO: 540, SEQ ID NO: 541, SEQ ID NO: 542, SEQ ID NO: 543, SEQ ID NO: 544, SEQ ID NO: 545, SEQ ID NO: 546, SEQ ID NO: 547, SEQ ID NO: 548, SEQ ID NO: 577, SEQ ID NO: 578, SEQ ID NO: 579, SEQ ID NO: 580, SEQ ID NO: 581, SEQ ID NO: 582, SEQ ID NO: 583, SEQ ID NO: 584, SEQ ID NO: 585, SEQ ID NO: 586, SEQ ID NO: 587, SEQ ID NO: 588, SEQ ID NO: 589, SEQ ID NO: 590, SEQ ID NO: 591, SEQ ID NO: 592, SEQ ID NO: 593, SEQ ID NO: 594, SEQ ID NO: 595, SEQ ID NO: 596, SEQ ID NO: 597, SEQ ID NO: 598, SEQ ID NO: 599, SEQ ID NO: 600, SEQ ID NO: 601, SEQ ID NO: 602, SEQ ID NO: 603, SEQ ID NO: 604, SEQ ID NO: 605, SEQ ID NO: 606, SEQ ID NO: 607, SEQ ID NO: 608, SEQ ID NO: 609, SEQ ID NO: 610, SEQ ID NO: 611, SEQ ID NO: 612, SEQ ID NO: 613, SEQ ID NO: 614, SEQ ID NO: 615, SEQ ID NO: 616, SEQ ID NO: 617, SEQ ID NO: 618, SEQ ID NO: 619, SEQ ID NO: 620, SEQ ID NO: 621, SEQ ID NO: 622, SEQ ID NO: 623, SEQ ID NO: 624, SEQ ID NO: 625, SEQ ID NO: 626, SEQ ID NO: 627, SEQ ID NO: 628, SEQ ID NO: 629, SEQ ID NO: 630, SEQ ID NO: 631, SEQ ID NO: 632, SEQ ID NO: 633, SEQ ID NO: 634, SEQ ID NO: 635, SEQ ID NO: 636, SEQ ID NO: 637, SEQ ID NO: 638, SEQ ID NO: 639, SEQ ID NO: 640, SEQ ID NO: 641, SEQ ID NO: 642, SEQ ID NO: 643, SEQ ID NO: 644, SEQ ID NO: 645, SEQ ID NO: 646, SEQ ID NO: 647, SEQ ID NO: 648, SEQ ID NO: 649, SEQ ID NO: 650, SEQ ID NO: 651, SEQ ID NO: 652, SEQ ID NO: 653, SEQ ID NO: 654, SEQ ID NO: 655, SEQ ID NO: 656, SEQ ID NO: 657, SEQ ID NO: 658, SEQ ID NO: 659, SEQ ID NO: 660, SEQ ID NO: 661, SEQ ID NO: 662, SEQ ID NO: 663, SEQ ID NO: 664, SEQ ID NO: 665, SEQ ID NO: 666, SEQ ID NO: 667, SEQ ID NO: 668, SEQ ID NO: 669, SEQ ID NO: 670, SEQ ID NO: 671, SEQ ID NO: 672, SEQ ID NO: 673, SEQ ID NO: 674, SEQ ID NO: 675, SEQ ID NO: 676, SEQ ID NO: 677, SEQ ID NO: 678, SEQ ID NO: 679, SEQ ID NO: 680, SEQ ID NO: 681, SEQ ID NO: 682, SEQ ID NO: 683, SEQ ID NO: 684, SEQ ID NO: 685, SEQ ID NO: 686, SEQ ID NO: 687, SEQ ID NO: 688, SEQ ID NO: 689, SEQ ID NO: 690, SEQ ID NO: 691, SEQ ID NO: 692, SEQ ID NO: 693, SEQ ID NO: 694, SEQ ID NO: 695, or SEQ ID NO: 696.

[0666] In some examples of any of the ABPCs described herein, the first antigen-binding domain includes a light chain variable domain comprising SEQ ID NO: 704, and a heavy chain variable domain comprising: SEQ ID NO: 502, SEQ ID NO: 510, SEQ ID NO: 511, SEQ ID NO: 512, SEQ ID NO: 513, SEQ ID NO: 514, SEQ ID NO: 515, SEQ ID NO: 516, SEQ ID NO: 517, SEQ ID NO: 518, SEQ ID NO: 519, SEQ ID NO: 520, SEQ ID NO: 521, SEQ ID NO: 522, SEQ ID NO: 523, SEQ ID NO: 524, SEQ ID NO: 525, SEQ ID NO: 526, SEQ ID NO: 527, SEQ ID NO: 528, SEQ ID NO: 529, SEQ ID NO: 530, SEQ ID NO: 531, SEQ ID NO: 532, SEQ ID NO: 533, SEQ ID NO: 534, SEQ ID NO: 535, SEQ ID NO: 536, SEQ ID NO: 537, SEQ ID NO: 538, SEQ ID NO: 539, SEQ ID NO: 540, SEQ ID NO: 541, SEQ ID NO: 542, SEQ ID NO: 543, SEQ ID NO: 544, SEQ ID NO: 545, SEQ ID NO: 546, SEQ ID NO: 547, SEQ ID NO: 548, SEQ ID NO: 577, SEQ ID NO: 578, SEQ ID NO: 579, SEQ ID NO: 580, SEQ ID NO: 581, SEQ ID NO: 582, SEQ ID NO: 583, SEQ ID NO: 584, SEQ ID NO: 585, SEQ ID NO: 586, SEQ ID NO: 587, SEQ ID NO: 588, SEQ ID NO: 589, SEQ ID NO: 590, SEQ ID NO: 591, SEQ ID NO: 592, SEQ ID NO: 593, SEQ ID NO: 594, SEQ ID NO: 595, SEQ ID NO: 596, SEQ ID NO: 597, SEQ ID NO: 598, SEQ ID NO: 599, SEQ ID NO: 600, SEQ ID NO: 601, SEQ ID NO: 602, SEQ ID NO: 603, SEQ ID NO: 604, SEQ ID NO: 605, SEQ ID NO: 606, SEQ ID NO: 607, SEQ ID NO: 608, SEQ ID NO: 609, SEQ ID NO: 610, SEQ ID NO: 611, SEQ ID NO: 612, SEQ ID NO: 613, SEQ ID NO: 614, SEQ ID NO: 615, SEQ ID NO: 616, SEQ ID NO: 617, SEQ ID NO: 618, SEQ ID NO: 619, SEQ ID NO: 620, SEQ ID NO: 621, SEQ ID NO: 622, SEQ ID NO: 623, SEQ ID NO: 624, SEQ ID NO: 625, SEQ ID NO: 626, SEQ ID NO: 627, SEQ ID NO: 628, SEQ ID NO: 629, SEQ ID NO: 630, SEQ ID NO: 631, SEQ ID NO: 632, SEQ ID NO: 633, SEQ ID NO: 634, SEQ ID NO: 635, SEQ ID NO: 636, SEQ ID NO: 637, SEQ ID NO: 638, SEQ ID NO: 639, SEQ ID NO: 640, SEQ ID NO: 641, SEQ ID NO: 642, SEQ ID NO: 643, SEQ ID NO: 644, SEQ ID NO: 645, SEQ ID NO: 646, SEQ ID NO: 647, SEQ ID NO: 648, SEQ ID NO: 649, SEQ ID NO: 650, SEQ ID NO: 651, SEQ ID NO: 652, SEQ ID NO: 653, SEQ ID NO: 654, SEQ ID NO: 655, SEQ ID NO: 656, SEQ ID NO: 657, SEQ ID NO: 658, SEQ ID NO: 659, SEQ ID NO: 660, SEQ ID NO: 661, SEQ ID NO: 662, SEQ ID NO: 663, SEQ ID NO: 664, SEQ ID NO: 665, SEQ ID NO: 666, SEQ ID NO: 667, SEQ ID NO: 668, SEQ ID NO: 669, SEQ ID NO: 670, SEQ ID NO: 671, SEQ ID NO: 672, SEQ ID NO: 673, SEQ ID NO: 674, SEQ ID NO: 675, SEQ ID NO: 676, SEQ ID NO: 677, SEQ ID NO: 678, SEQ ID NO: 679, SEQ ID NO: 680, SEQ ID NO: 681, SEQ ID NO: 682, SEQ ID NO: 683, SEQ ID NO: 684, SEQ ID NO: 685, SEQ ID NO: 686, SEQ ID NO: 687, SEQ ID NO: 688, SEQ ID NO: 689, SEQ ID NO: 690, SEQ ID NO: 691, SEQ ID NO: 692, SEQ ID NO: 693, SEQ ID NO: 694, SEQ ID NO: 695, or SEQ ID NO: 696.

[0667] In some examples of any of the ABPCs described herein, the first antigen-binding domain includes a light chain variable domain comprising SEQ ID NO: 705, and a heavy chain variable domain comprising: SEQ ID NO: 502, SEQ ID NO: 510, SEQ ID NO: 511, SEQ ID NO: 512, SEQ ID NO: 513, SEQ ID NO: 514, SEQ ID NO: 515, SEQ ID NO: 516, SEQ ID NO: 517, SEQ ID NO: 518, SEQ ID NO: 519, SEQ ID NO: 520, SEQ ID NO: 521, SEQ ID NO: 522, SEQ ID NO: 523, SEQ ID NO: 524, SEQ ID NO: 525, SEQ ID NO: 526, SEQ ID NO: 527, SEQ ID NO: 528, SEQ ID NO: 529, SEQ ID NO: 530, SEQ ID NO: 531, SEQ ID NO: 532, SEQ ID NO: 533, SEQ ID NO: 534, SEQ ID NO: 535, SEQ ID NO: 536, SEQ ID NO: 537, SEQ ID NO: 538, SEQ ID NO: 539, SEQ ID NO: 540, SEQ ID NO: 541, SEQ ID NO: 542, SEQ ID NO: 543, SEQ ID NO: 544, SEQ ID NO: 545, SEQ ID NO: 546, SEQ ID NO: 547, SEQ ID NO: 548, SEQ ID NO: 577, SEQ ID NO: 578, SEQ ID NO: 579, SEQ ID NO: 580, SEQ ID NO: 581, SEQ ID NO: 582, SEQ ID NO: 583, SEQ ID NO: 584, SEQ ID NO: 585, SEQ ID NO: 586, SEQ ID NO: 587, SEQ ID NO: 588, SEQ ID NO: 589, SEQ ID NO: 590, SEQ ID NO: 591, SEQ ID NO: 592, SEQ ID NO: 593, SEQ ID NO: 594, SEQ ID NO: 595, SEQ ID NO: 596, SEQ ID NO: 597, SEQ ID NO: 598, SEQ ID NO: 599, SEQ ID NO: 600, SEQ ID NO: 601, SEQ ID NO: 602, SEQ ID NO: 603, SEQ ID NO: 604, SEQ ID NO: 605, SEQ ID NO: 606, SEQ ID NO: 607, SEQ ID NO: 608, SEQ ID NO: 609, SEQ ID NO: 610, SEQ ID NO: 611, SEQ ID NO: 612, SEQ ID NO: 613, SEQ ID NO: 614, SEQ ID NO: 615, SEQ ID NO: 616, SEQ ID NO: 617, SEQ ID NO: 618, SEQ ID NO: 619, SEQ ID NO: 620, SEQ ID NO: 621, SEQ ID NO: 622, SEQ ID NO: 623, SEQ ID NO: 624, SEQ ID NO: 625, SEQ ID NO: 626, SEQ ID NO: 627, SEQ ID NO: 628, SEQ ID NO: 629, SEQ ID NO: 630, SEQ ID NO: 631, SEQ ID NO: 632, SEQ ID NO: 633, SEQ ID NO: 634, SEQ ID NO: 635, SEQ ID NO: 636, SEQ ID NO: 637, SEQ ID NO: 638, SEQ ID NO: 639, SEQ ID NO: 640, SEQ ID NO: 641, SEQ ID NO: 642, SEQ ID NO: 643, SEQ ID NO: 644, SEQ ID NO: 645, SEQ ID NO: 646, SEQ ID NO: 647, SEQ ID NO: 648, SEQ ID NO: 649, SEQ ID NO: 650, SEQ ID NO: 651, SEQ ID NO: 652, SEQ ID NO: 653, SEQ ID NO: 654, SEQ ID NO: 655, SEQ ID NO: 656, SEQ ID NO: 657, SEQ ID NO: 658, SEQ ID NO: 659, SEQ ID NO: 660, SEQ ID NO: 661, SEQ ID NO: 662, SEQ ID NO: 663, SEQ ID NO: 664, SEQ ID NO: 665, SEQ ID NO: 666, SEQ ID NO: 667, SEQ ID NO: 668, SEQ ID NO: 669, SEQ ID NO: 670, SEQ ID NO: 671, SEQ ID NO: 672, SEQ ID NO: 673, SEQ ID NO: 674, SEQ ID NO: 675, SEQ ID NO: 676, SEQ ID NO: 677, SEQ ID NO: 678, SEQ ID NO: 679, SEQ ID NO: 680, SEQ ID NO: 681, SEQ ID NO: 682, SEQ ID NO: 683, SEQ ID NO: 684, SEQ ID NO: 685, SEQ ID NO: 686, SEQ ID NO: 687, SEQ ID NO: 688, SEQ ID NO: 689, SEQ ID NO: 690, SEQ ID NO: 691, SEQ ID NO: 692, SEQ ID NO: 693, SEQ ID NO: 694, SEQ ID NO: 695, or SEQ ID NO: 696.

[0668] In some examples of any of the ABPCs described herein, the first antigen-binding domain includes a light chain variable domain comprising SEQ ID NO: 706, and a heavy chain variable domain comprising: SEQ ID NO: 502, SEQ ID NO: 510, SEQ ID NO: 511, SEQ ID NO: 512, SEQ ID NO: 513, SEQ ID NO: 514, SEQ ID NO: 515, SEQ ID NO: 516, SEQ ID NO: 517, SEQ ID NO: 518, SEQ ID NO: 519, SEQ ID NO: 520, SEQ ID NO: 521, SEQ ID NO: 522, SEQ ID NO: 523, SEQ ID NO: 524, SEQ ID NO: 525, SEQ ID NO: 526, SEQ ID NO: 527, SEQ ID NO: 528, SEQ ID NO: 529, SEQ ID NO: 530, SEQ ID NO: 531, SEQ ID NO: 532, SEQ ID NO: 533, SEQ ID NO: 534, SEQ ID NO: 535, SEQ ID NO: 536, SEQ ID NO: 537, SEQ ID NO: 538, SEQ ID NO: 539, SEQ ID NO: 540, SEQ ID NO: 541, SEQ ID NO: 542, SEQ ID NO: 543, SEQ ID NO: 544, SEQ ID NO: 545, SEQ ID NO: 546, SEQ ID NO: 547, SEQ ID NO: 548, SEQ ID NO: 577, SEQ ID NO: 578, SEQ ID NO: 579, SEQ ID NO: 580, SEQ ID NO: 581, SEQ ID NO: 582, SEQ ID NO: 583, SEQ ID NO: 584, SEQ ID NO: 585, SEQ ID NO: 586, SEQ ID NO: 587, SEQ ID NO: 588, SEQ ID NO: 589, SEQ ID NO: 590, SEQ ID NO: 591, SEQ ID NO: 592, SEQ ID NO: 593, SEQ ID NO: 594, SEQ ID NO: 595, SEQ ID NO: 596, SEQ ID NO: 597, SEQ ID NO: 598, SEQ ID NO: 599, SEQ ID NO: 600, SEQ ID NO: 601, SEQ ID NO: 602, SEQ ID NO: 603, SEQ ID NO: 604, SEQ ID NO: 605, SEQ ID NO: 606, SEQ ID NO: 607, SEQ ID NO: 608, SEQ ID NO: 609, SEQ ID NO: 610, SEQ ID NO: 611, SEQ ID NO: 612, SEQ ID NO: 613, SEQ ID NO: 614, SEQ ID NO: 615, SEQ ID NO: 616, SEQ ID NO: 617, SEQ ID NO: 618, SEQ ID NO: 619, SEQ ID NO: 620, SEQ ID NO: 621, SEQ ID NO: 622, SEQ ID NO: 623, SEQ ID NO: 624, SEQ ID NO: 625, SEQ ID NO: 626, SEQ ID NO: 627, SEQ ID NO: 628, SEQ ID NO: 629, SEQ ID NO: 630, SEQ ID NO: 631, SEQ ID NO: 632, SEQ ID NO: 633, SEQ ID NO: 634, SEQ ID NO: 635, SEQ ID NO: 636, SEQ ID NO: 637, SEQ ID NO: 638, SEQ ID NO: 639, SEQ ID NO: 640, SEQ ID NO: 641, SEQ ID NO: 642, SEQ ID NO: 643, SEQ ID NO: 644, SEQ ID NO: 645, SEQ ID NO: 646, SEQ ID NO: 647, SEQ ID NO: 648, SEQ ID NO: 649, SEQ ID NO: 650, SEQ ID NO: 651, SEQ ID NO: 652, SEQ ID NO: 653, SEQ ID NO: 654, SEQ ID NO: 655, SEQ ID NO: 656, SEQ ID NO: 657, SEQ ID NO: 658, SEQ ID NO: 659, SEQ ID NO: 660, SEQ ID NO: 661, SEQ ID NO: 662, SEQ ID NO: 663, SEQ ID NO: 664, SEQ ID NO: 665, SEQ ID NO: 666, SEQ ID NO: 667, SEQ ID NO: 668, SEQ ID NO: 669, SEQ ID NO: 670, SEQ ID NO: 671, SEQ ID NO: 672, SEQ ID NO: 673, SEQ ID NO: 674, SEQ ID NO: 675, SEQ ID NO: 676, SEQ ID NO: 677, SEQ ID NO: 678, SEQ ID NO: 679, SEQ ID NO: 680, SEQ ID NO: 681, SEQ ID NO: 682, SEQ ID NO: 683, SEQ ID NO: 684, SEQ ID NO: 685, SEQ ID NO: 686, SEQ ID NO: 687, SEQ ID NO: 688, SEQ ID NO: 689, SEQ ID NO: 690, SEQ ID NO: 691, SEQ ID NO: 692, SEQ ID NO: 693, SEQ ID NO: 694, SEQ ID NO: 695, or SEQ ID NO: 696.

[0669] In some examples of any of the ABPCs described herein, the first antigen-binding domain includes a light chain variable domain comprising SEQ ID NO: 707, and a heavy chain variable domain comprising: SEQ ID NO: 502, SEQ ID NO: 510, SEQ ID NO: 511, SEQ ID NO: 512, SEQ ID NO: 513, SEQ ID NO: 514, SEQ ID NO: 515, SEQ ID NO: 516, SEQ ID NO: 517, SEQ ID NO: 518, SEQ ID NO: 519, SEQ ID NO: 520, SEQ ID NO: 521, SEQ ID NO: 522, SEQ ID NO: 523, SEQ ID NO: 524, SEQ ID NO: 525, SEQ ID NO: 526, SEQ ID NO: 527, SEQ ID NO: 528, SEQ ID NO: 529, SEQ ID NO: 530, SEQ ID NO: 531, SEQ ID NO: 532, SEQ ID NO: 533, SEQ ID NO: 534, SEQ ID NO: 535, SEQ ID NO: 536, SEQ ID NO: 537, SEQ ID NO: 538, SEQ ID NO: 539, SEQ ID NO: 540, SEQ ID NO: 541, SEQ ID NO: 542, SEQ ID NO: 543, SEQ ID NO: 544, SEQ ID NO: 545, SEQ ID NO: 546, SEQ ID NO: 547, SEQ ID NO: 548, SEQ ID NO: 577, SEQ ID NO: 578, SEQ ID NO: 579, SEQ ID NO: 580, SEQ ID NO: 581, SEQ ID NO: 582, SEQ ID NO: 583, SEQ ID NO: 584, SEQ ID NO: 585, SEQ ID NO: 586, SEQ ID NO: 587, SEQ ID NO: 588, SEQ ID NO: 589, SEQ ID NO: 590, SEQ ID NO: 591, SEQ ID NO: 592, SEQ ID NO: 593, SEQ ID NO: 594, SEQ ID NO: 595, SEQ ID NO: 596, SEQ ID NO: 597, SEQ ID NO: 598, SEQ ID NO: 599, SEQ ID NO: 600, SEQ ID NO: 601, SEQ ID NO: 602, SEQ ID NO: 603, SEQ ID NO: 604, SEQ ID NO: 605, SEQ ID NO: 606, SEQ ID NO: 607, SEQ ID NO: 608, SEQ ID NO: 609, SEQ ID NO: 610, SEQ ID NO: 611, SEQ ID NO: 612, SEQ ID NO: 613, SEQ ID NO: 614, SEQ ID NO: 615, SEQ ID NO: 616, SEQ ID NO: 617, SEQ ID NO: 618, SEQ ID NO: 619, SEQ ID NO: 620, SEQ ID NO: 621, SEQ ID NO: 622, SEQ ID NO: 623, SEQ ID NO: 624, SEQ ID NO: 625, SEQ ID NO: 626, SEQ ID NO: 627, SEQ ID NO: 628, SEQ ID NO: 629, SEQ ID NO: 630, SEQ ID NO: 631, SEQ ID NO: 632, SEQ ID NO: 633, SEQ ID NO: 634, SEQ ID NO: 635, SEQ ID NO: 636, SEQ ID NO: 637, SEQ ID NO: 638, SEQ ID NO: 639, SEQ ID NO: 640, SEQ ID NO: 641, SEQ ID NO: 642, SEQ ID NO: 643, SEQ ID NO: 644, SEQ ID NO: 645, SEQ ID NO: 646, SEQ ID NO: 647, SEQ ID NO: 648, SEQ ID NO: 649, SEQ ID NO: 650, SEQ ID NO: 651, SEQ ID NO: 652, SEQ ID NO: 653, SEQ ID NO: 654, SEQ ID NO: 655, SEQ ID NO: 656, SEQ ID NO: 657, SEQ ID NO: 658, SEQ ID NO: 659, SEQ ID NO: 660, SEQ ID NO: 661, SEQ ID NO: 662, SEQ ID NO: 663, SEQ ID NO: 664, SEQ ID NO: 665, SEQ ID NO: 666, SEQ ID NO: 667, SEQ ID NO: 668, SEQ ID NO: 669, SEQ ID NO: 670, SEQ ID NO: 671, SEQ ID NO: 672, SEQ ID NO: 673, SEQ ID NO: 674, SEQ ID NO: 675, SEQ ID NO: 676, SEQ ID NO: 677, SEQ ID NO: 678, SEQ ID NO: 679, SEQ ID NO: 680, SEQ ID NO: 681, SEQ ID NO: 682, SEQ ID NO: 683, SEQ ID NO: 684, SEQ ID NO: 685, SEQ ID NO: 686, SEQ ID NO: 687, SEQ ID NO: 688, SEQ ID NO: 689, SEQ ID NO: 690, SEQ ID NO: 691, SEQ ID NO: 692, SEQ ID NO: 693, SEQ ID NO: 694, SEQ ID NO: 695, or SEQ ID NO: 696.

[0670] In some examples of any of the ABPCs described herein, the first antigen-binding domain includes a light chain variable domain comprising SEQ ID NO: 708, and a heavy chain variable domain comprising: SEQ ID NO: 502, SEQ ID NO: 510, SEQ ID NO: 511, SEQ ID NO: 512, SEQ ID NO: 513, SEQ ID NO: 514, SEQ ID NO: 515, SEQ ID NO: 516, SEQ ID NO: 517, SEQ ID NO: 518, SEQ ID NO: 519, SEQ ID NO: 520, SEQ ID NO: 521, SEQ ID NO: 522, SEQ ID NO: 523, SEQ ID NO: 524, SEQ ID NO: 525, SEQ ID NO: 526, SEQ ID NO: 527, SEQ ID NO: 528, SEQ ID NO: 529, SEQ ID NO: 530, SEQ ID NO: 531, SEQ ID NO: 532, SEQ ID NO: 533, SEQ ID NO: 534, SEQ ID NO: 535, SEQ ID NO: 536, SEQ ID NO: 537, SEQ ID NO: 538, SEQ ID NO: 539, SEQ ID NO: 540, SEQ ID NO: 541, SEQ ID NO: 542, SEQ ID NO: 543, SEQ ID NO: 544, SEQ ID NO: 545, SEQ ID NO: 546, SEQ ID NO: 547, SEQ ID NO: 548, SEQ ID NO: 577, SEQ ID NO: 578, SEQ ID NO: 579, SEQ ID NO: 580, SEQ ID NO: 581, SEQ ID NO: 582, SEQ ID NO: 583, SEQ ID NO: 584, SEQ ID NO: 585, SEQ ID NO: 586, SEQ ID NO: 587, SEQ ID NO: 588, SEQ ID NO: 589, SEQ ID NO: 590, SEQ ID NO: 591, SEQ ID NO: 592, SEQ ID NO: 593, SEQ ID NO: 594, SEQ ID NO: 595, SEQ ID NO: 596, SEQ ID NO: 597, SEQ ID NO: 598, SEQ ID NO: 599, SEQ ID NO: 600, SEQ ID NO: 601, SEQ ID NO: 602, SEQ ID NO: 603, SEQ ID NO: 604, SEQ ID NO: 605, SEQ ID NO: 606, SEQ ID NO: 607, SEQ ID NO: 608, SEQ ID NO: 609, SEQ ID NO: 610, SEQ ID NO: 611, SEQ ID NO: 612, SEQ ID NO: 613, SEQ ID NO: 614, SEQ ID NO: 615, SEQ ID NO: 616, SEQ ID NO: 617, SEQ ID NO: 618, SEQ ID NO: 619, SEQ ID NO: 620, SEQ ID NO: 621, SEQ ID NO: 622, SEQ ID NO: 623, SEQ ID NO: 624, SEQ ID NO: 625, SEQ ID NO: 626, SEQ ID NO: 627, SEQ ID NO: 628, SEQ ID NO: 629, SEQ ID NO: 630, SEQ ID NO: 631, SEQ ID NO: 632, SEQ ID NO: 633, SEQ ID NO: 634, SEQ ID NO: 635, SEQ ID NO: 636, SEQ ID NO: 637, SEQ ID NO: 638, SEQ ID NO: 639, SEQ ID NO: 640, SEQ ID NO: 641, SEQ ID NO: 642, SEQ ID NO: 643, SEQ ID NO: 644, SEQ ID NO: 645, SEQ ID NO: 646, SEQ ID NO: 647, SEQ ID NO: 648, SEQ ID NO: 649, SEQ ID NO: 650, SEQ ID NO: 651, SEQ ID NO: 652, SEQ ID NO: 653, SEQ ID NO: 654, SEQ ID NO: 655, SEQ ID NO: 656, SEQ ID NO: 657, SEQ ID NO: 658, SEQ ID NO: 659, SEQ ID NO: 660, SEQ ID NO: 661, SEQ ID NO: 662, SEQ ID NO: 663, SEQ ID NO: 664, SEQ ID NO: 665, SEQ ID NO: 666, SEQ ID NO: 667, SEQ ID NO: 668, SEQ ID NO: 669, SEQ ID NO: 670, SEQ ID NO: 671, SEQ ID NO: 672, SEQ ID NO: 673, SEQ ID NO: 674, SEQ ID NO: 675, SEQ ID NO: 676, SEQ ID NO: 677, SEQ ID NO: 678, SEQ ID NO: 679, SEQ ID NO: 680, SEQ ID NO: 681, SEQ ID NO: 682, SEQ ID NO: 683, SEQ ID NO: 684, SEQ ID NO: 685, SEQ ID NO: 686, SEQ ID NO: 687, SEQ ID NO: 688, SEQ ID NO: 689, SEQ ID NO: 690, SEQ ID NO: 691, SEQ ID NO: 692, SEQ ID NO: 693, SEQ ID NO: 694, SEQ ID NO: 695, or SEQ ID NO: 696.

[0671] In some examples of any of the ABPCs described herein, the first antigen-binding domain includes a light chain variable domain comprising SEQ ID NO: 709, and a heavy chain variable domain comprising: SEQ ID NO: 502, SEQ ID NO: 510, SEQ ID NO: 511, SEQ ID NO: 512, SEQ ID NO: 513, SEQ ID NO: 514, SEQ ID NO: 515, SEQ ID NO: 516, SEQ ID NO: 517, SEQ ID NO: 518, SEQ ID NO: 519, SEQ ID NO: 520, SEQ ID NO: 521, SEQ ID NO: 522, SEQ ID NO: 523, SEQ ID NO: 524, SEQ ID NO: 525, SEQ ID NO: 526, SEQ ID NO: 527, SEQ ID NO: 528, SEQ ID NO: 529, SEQ ID NO: 530, SEQ ID NO: 531, SEQ ID NO: 532, SEQ ID NO: 533, SEQ ID NO: 534, SEQ ID NO: 535, SEQ ID NO: 536, SEQ ID NO: 537, SEQ ID NO: 538, SEQ ID NO: 539, SEQ ID NO: 540, SEQ ID NO: 541, SEQ ID NO: 542, SEQ ID NO: 543, SEQ ID NO: 544, SEQ ID NO: 545, SEQ ID NO: 546, SEQ ID NO: 547, SEQ ID NO: 548, SEQ ID NO: 577, SEQ ID NO: 578, SEQ ID NO: 579, SEQ ID NO: 580, SEQ ID NO: 581, SEQ ID NO: 582, SEQ ID NO: 583, SEQ ID NO: 584, SEQ ID NO: 585, SEQ ID NO: 586, SEQ ID NO: 587, SEQ ID NO: 588, SEQ ID NO: 589, SEQ ID NO: 590, SEQ ID NO: 591, SEQ ID NO: 592, SEQ ID NO: 593, SEQ ID NO: 594, SEQ ID NO: 595, SEQ ID NO: 596, SEQ ID NO: 597, SEQ ID NO: 598, SEQ ID NO: 599, SEQ ID NO: 600, SEQ ID NO: 601, SEQ ID NO: 602, SEQ ID NO: 603, SEQ ID NO: 604, SEQ ID NO: 605, SEQ ID NO: 606, SEQ ID NO: 607, SEQ ID NO: 608, SEQ ID NO: 609, SEQ ID NO: 610, SEQ ID NO: 611, SEQ ID NO: 612, SEQ ID NO: 613, SEQ ID NO: 614, SEQ ID NO: 615, SEQ ID NO: 616, SEQ ID NO: 617, SEQ ID NO: 618, SEQ ID NO: 619, SEQ ID NO: 620, SEQ ID NO: 621, SEQ ID NO: 622, SEQ ID NO: 623, SEQ ID NO: 624, SEQ ID NO: 625, SEQ ID NO: 626, SEQ ID NO: 627, SEQ ID NO: 628, SEQ ID NO: 629, SEQ ID NO: 630, SEQ ID NO: 631, SEQ ID NO: 632, SEQ ID NO: 633, SEQ ID NO: 634, SEQ ID NO: 635, SEQ ID NO: 636, SEQ ID NO: 637, SEQ ID NO: 638, SEQ ID NO: 639, SEQ ID NO: 640, SEQ ID NO: 641, SEQ ID NO: 642, SEQ ID NO: 643, SEQ ID NO: 644, SEQ ID NO: 645, SEQ ID NO: 646, SEQ ID NO: 647, SEQ ID NO: 648, SEQ ID NO: 649, SEQ ID NO: 650, SEQ ID NO: 651, SEQ ID NO: 652, SEQ ID NO: 653, SEQ ID NO: 654, SEQ ID NO: 655, SEQ ID NO: 656, SEQ ID NO: 657, SEQ ID NO: 658, SEQ ID NO: 659, SEQ ID NO: 660, SEQ ID NO: 661, SEQ ID NO: 662, SEQ ID NO: 663, SEQ ID NO: 664, SEQ ID NO: 665, SEQ ID NO: 666, SEQ ID NO: 667, SEQ ID NO: 668, SEQ ID NO: 669, SEQ ID NO: 670, SEQ ID NO: 671, SEQ ID NO: 672, SEQ ID NO: 673, SEQ ID NO: 674, SEQ ID NO: 675, SEQ ID NO: 676, SEQ ID NO: 677, SEQ ID NO: 678, SEQ ID NO: 679, SEQ ID NO: 680, SEQ ID NO: 681, SEQ ID NO: 682, SEQ ID NO: 683, SEQ ID NO: 684, SEQ ID NO: 685, SEQ ID NO: 686, SEQ ID NO: 687, SEQ ID NO: 688, SEQ ID NO: 689, SEQ ID NO: 690, SEQ ID NO: 691, SEQ ID NO: 692, SEQ ID NO: 693, SEQ ID NO: 694, SEQ ID NO: 695, or SEQ ID NO: 696.

[0672] In some examples of any of the ABPCs described herein, the first antigen-binding domain includes a light chain variable domain comprising SEQ ID NO: 710, and a heavy chain variable domain comprising: SEQ ID NO: 502, SEQ ID NO: 510, SEQ ID NO: 511, SEQ ID NO: 512, SEQ ID NO: 513, SEQ ID NO: 514, SEQ ID NO: 515, SEQ ID NO: 516, SEQ ID NO: 517, SEQ ID NO: 518, SEQ ID NO: 519, SEQ ID NO: 520, SEQ ID NO: 521, SEQ ID NO: 522, SEQ ID NO: 523, SEQ ID NO: 524, SEQ ID NO: 525, SEQ ID NO: 526, SEQ ID NO: 527, SEQ ID NO: 528, SEQ ID NO: 529, SEQ ID NO: 530, SEQ ID NO: 531, SEQ ID NO: 532, SEQ ID NO: 533, SEQ ID NO: 534, SEQ ID NO: 535, SEQ ID NO: 536, SEQ ID NO: 537, SEQ ID NO: 538, SEQ ID NO: 539, SEQ ID NO: 540, SEQ ID NO: 541, SEQ ID NO: 542, SEQ ID NO: 543, SEQ ID NO: 544, SEQ ID NO: 545, SEQ ID NO: 546, SEQ ID NO: 547, SEQ ID NO: 548, SEQ ID NO: 577, SEQ ID NO: 578, SEQ ID NO: 579, SEQ ID NO: 580, SEQ ID NO: 581, SEQ ID NO: 582, SEQ ID NO: 583, SEQ ID NO: 584, SEQ ID NO: 585, SEQ ID NO: 586, SEQ ID NO: 587, SEQ ID NO: 588, SEQ ID NO: 589, SEQ ID NO: 590, SEQ ID NO: 591, SEQ ID NO: 592, SEQ ID NO: 593, SEQ ID NO: 594, SEQ ID NO: 595, SEQ ID NO: 596, SEQ ID NO: 597, SEQ ID NO: 598, SEQ ID NO: 599, SEQ ID NO: 600, SEQ ID NO: 601, SEQ ID NO: 602, SEQ ID NO: 603, SEQ ID NO: 604, SEQ ID NO: 605, SEQ ID NO: 606, SEQ ID NO: 607, SEQ ID NO: 608, SEQ ID NO: 609, SEQ ID NO: 610, SEQ ID NO: 611, SEQ ID NO: 612, SEQ ID NO: 613, SEQ ID NO: 614, SEQ ID NO: 615, SEQ ID NO: 616, SEQ ID NO: 617, SEQ ID NO: 618, SEQ ID NO: 619, SEQ ID NO: 620, SEQ ID NO: 621, SEQ ID NO: 622, SEQ ID NO: 623, SEQ ID NO: 624, SEQ ID NO: 625, SEQ ID NO: 626, SEQ ID NO: 627, SEQ ID NO: 628, SEQ ID NO: 629, SEQ ID NO: 630, SEQ ID NO: 631, SEQ ID NO: 632, SEQ ID NO: 633, SEQ ID NO: 634, SEQ ID NO: 635, SEQ ID NO: 636, SEQ ID NO: 637, SEQ ID NO: 638, SEQ ID NO: 639, SEQ ID NO: 640, SEQ ID NO: 641, SEQ ID NO: 642, SEQ ID NO: 643, SEQ ID NO: 644, SEQ ID NO: 645, SEQ ID NO: 646, SEQ ID NO: 647, SEQ ID NO: 648, SEQ ID NO: 649, SEQ ID NO: 650, SEQ ID NO: 651, SEQ ID NO: 652, SEQ ID NO: 653, SEQ ID NO: 654, SEQ ID NO: 655, SEQ ID NO: 656, SEQ ID NO: 657, SEQ ID NO: 658, SEQ ID NO: 659, SEQ ID NO: 660, SEQ ID NO: 661, SEQ ID NO: 662, SEQ ID NO: 663, SEQ ID NO: 664, SEQ ID NO: 665, SEQ ID NO: 666, SEQ ID NO: 667, SEQ ID NO: 668, SEQ ID NO: 669, SEQ ID NO: 670, SEQ ID NO: 671, SEQ ID NO: 672, SEQ ID NO: 673, SEQ ID NO: 674, SEQ ID NO: 675, SEQ ID NO: 676, SEQ ID NO: 677, SEQ ID NO: 678, SEQ ID NO: 679, SEQ ID NO: 680, SEQ ID NO: 681, SEQ ID NO: 682, SEQ ID NO: 683, SEQ ID NO: 684, SEQ ID NO: 685, SEQ ID NO: 686, SEQ ID NO: 687, SEQ ID NO: 688, SEQ ID NO: 689, SEQ ID NO: 690, SEQ ID NO: 691, SEQ ID NO: 692, SEQ ID NO: 693, SEQ ID NO: 694, SEQ ID NO: 695, or SEQ ID NO: 696.

[0673] In some examples of any of the ABPCs described herein, the first antigen-binding domain includes a light chain variable domain comprising SEQ ID NO: 711, and a heavy chain variable domain comprising: SEQ ID NO: 502, SEQ ID NO: 510, SEQ ID NO: 511, SEQ ID NO: 512, SEQ ID NO: 513, SEQ ID NO: 514, SEQ ID NO: 515, SEQ ID NO: 516, SEQ ID NO: 517, SEQ ID NO: 518, SEQ ID NO: 519, SEQ ID NO: 520, SEQ ID NO: 521, SEQ ID NO: 522, SEQ ID NO: 523, SEQ ID NO: 524, SEQ ID NO: 525, SEQ ID NO: 526, SEQ ID NO: 527, SEQ ID NO: 528, SEQ ID NO: 529, SEQ ID NO: 530, SEQ ID NO: 531, SEQ ID NO: 532, SEQ ID NO: 533, SEQ ID NO: 534, SEQ ID NO: 535, SEQ ID NO: 536, SEQ ID NO: 537, SEQ ID NO: 538, SEQ ID NO: 539, SEQ ID NO: 540, SEQ ID NO: 541, SEQ ID NO: 542, SEQ ID NO: 543, SEQ ID NO: 544, SEQ ID NO: 545, SEQ ID NO: 546, SEQ ID NO: 547, SEQ ID NO: 548, SEQ ID NO: 577, SEQ ID NO: 578, SEQ ID NO: 579, SEQ ID NO: 580, SEQ ID NO: 581, SEQ ID NO: 582, SEQ ID NO: 583, SEQ ID NO: 584, SEQ ID NO: 585, SEQ ID NO: 586, SEQ ID NO: 587, SEQ ID NO: 588, SEQ ID NO: 589, SEQ ID NO: 590, SEQ ID NO: 591, SEQ ID NO: 592, SEQ ID NO: 593, SEQ ID NO: 594, SEQ ID NO: 595, SEQ ID NO: 596, SEQ ID NO: 597, SEQ ID NO: 598, SEQ ID NO: 599, SEQ ID NO: 600, SEQ ID NO: 601, SEQ ID NO: 602, SEQ ID NO: 603, SEQ ID NO: 604, SEQ ID NO: 605, SEQ ID NO: 606, SEQ ID NO: 607, SEQ ID NO: 608, SEQ ID NO: 609, SEQ ID NO: 610, SEQ ID NO: 611, SEQ ID NO: 612, SEQ ID NO: 613, SEQ ID NO: 614, SEQ ID NO: 615, SEQ ID NO: 616, SEQ ID NO: 617, SEQ ID NO: 618, SEQ ID NO: 619, SEQ ID NO: 620, SEQ ID NO: 621, SEQ ID NO: 622, SEQ ID NO: 623, SEQ ID NO: 624, SEQ ID NO: 625, SEQ ID NO: 626, SEQ ID NO: 627, SEQ ID NO: 628, SEQ ID NO: 629, SEQ ID NO: 630, SEQ ID NO: 631, SEQ ID NO: 632, SEQ ID NO: 633, SEQ ID NO: 634, SEQ ID NO: 635, SEQ ID NO: 636, SEQ ID NO: 637, SEQ ID NO: 638, SEQ ID NO: 639, SEQ ID NO: 640, SEQ ID NO: 641, SEQ ID NO: 642, SEQ ID NO: 643, SEQ ID NO: 644, SEQ ID NO: 645, SEQ ID NO: 646, SEQ ID NO: 647, SEQ ID NO: 648, SEQ ID NO: 649, SEQ ID NO: 650, SEQ ID NO: 651, SEQ ID NO: 652, SEQ ID NO: 653, SEQ ID NO: 654, SEQ ID NO: 655, SEQ ID NO: 656, SEQ ID NO: 657, SEQ ID NO: 658, SEQ ID NO: 659, SEQ ID NO: 660, SEQ ID NO: 661, SEQ ID NO: 662, SEQ ID NO: 663, SEQ ID NO: 664, SEQ ID NO: 665, SEQ ID NO: 666, SEQ ID NO: 667, SEQ ID NO: 668, SEQ ID NO: 669, SEQ ID NO: 670, SEQ ID NO: 671, SEQ ID NO: 672, SEQ ID NO: 673, SEQ ID NO: 674, SEQ ID NO: 675, SEQ ID NO: 676, SEQ ID NO: 677, SEQ ID NO: 678, SEQ ID NO: 679, SEQ ID NO: 680, SEQ ID NO: 681, SEQ ID NO: 682, SEQ ID NO: 683, SEQ ID NO: 684, SEQ ID NO: 685, SEQ ID NO: 686, SEQ ID NO: 687, SEQ ID NO: 688, SEQ ID NO: 689, SEQ ID NO: 690, SEQ ID NO: 691, SEQ ID NO: 692, SEQ ID NO: 693, SEQ ID NO: 694, SEQ ID NO: 695, or SEQ ID NO: 696.

[0674] In some examples of any of the ABPCs described herein, the first antigen-binding domain includes a light chain variable domain comprising SEQ ID NO: 712, and a heavy chain variable domain comprising: SEQ ID NO: 502, SEQ ID NO: 510, SEQ ID NO: 511, SEQ ID NO: 512, SEQ ID NO: 513, SEQ ID NO: 514, SEQ ID NO: 515, SEQ ID NO: 516, SEQ ID NO: 517, SEQ ID NO: 518, SEQ ID NO: 519, SEQ ID NO: 520, SEQ ID NO: 521, SEQ ID NO: 522, SEQ ID NO: 523, SEQ ID NO: 524, SEQ ID NO: 525, SEQ ID NO: 526, SEQ ID NO: 527, SEQ ID NO: 528, SEQ ID NO: 529, SEQ ID NO: 530, SEQ ID NO: 531, SEQ ID NO: 532, SEQ ID NO: 533, SEQ ID NO: 534, SEQ ID NO: 535, SEQ ID NO: 536, SEQ ID NO: 537, SEQ ID NO: 538, SEQ ID NO: 539, SEQ ID NO: 540, SEQ ID NO: 541, SEQ ID NO: 542, SEQ ID NO: 543, SEQ ID NO: 544, SEQ ID NO: 545, SEQ ID NO: 546, SEQ ID NO: 547, SEQ ID NO: 548, SEQ ID NO: 577, SEQ ID NO: 578, SEQ ID NO: 579, SEQ ID NO: 580, SEQ ID NO: 581, SEQ ID NO: 582, SEQ ID NO: 583, SEQ ID NO: 584, SEQ ID NO: 585, SEQ ID NO: 586, SEQ ID NO: 587, SEQ ID NO: 588, SEQ ID NO: 589, SEQ ID NO: 590, SEQ ID NO: 591, SEQ ID NO: 592, SEQ ID NO: 593, SEQ ID NO: 594, SEQ ID NO: 595, SEQ ID NO: 596, SEQ ID NO: 597, SEQ ID NO: 598, SEQ ID NO: 599, SEQ ID NO: 600, SEQ ID NO: 601, SEQ ID NO: 602, SEQ ID NO: 603, SEQ ID NO: 604, SEQ ID NO: 605, SEQ ID NO: 606, SEQ ID NO: 607, SEQ ID NO: 608, SEQ ID NO: 609, SEQ ID NO: 610, SEQ ID NO: 611, SEQ ID NO: 612, SEQ ID NO: 613, SEQ ID NO: 614, SEQ ID NO: 615, SEQ ID NO: 616, SEQ ID NO: 617, SEQ ID NO: 618, SEQ ID NO: 619, SEQ ID NO: 620, SEQ ID NO: 621, SEQ ID NO: 622, SEQ ID NO: 623, SEQ ID NO: 624, SEQ ID NO: 625, SEQ ID NO: 626, SEQ ID NO: 627, SEQ ID NO: 628, SEQ ID NO: 629, SEQ ID NO: 630, SEQ ID NO: 631, SEQ ID NO: 632, SEQ ID NO: 633, SEQ ID NO: 634, SEQ ID NO: 635, SEQ ID NO: 636, SEQ ID NO: 637, SEQ ID NO: 638, SEQ ID NO: 639, SEQ ID NO: 640, SEQ ID NO: 641, SEQ ID NO: 642, SEQ ID NO: 643, SEQ ID NO: 644, SEQ ID NO: 645, SEQ ID NO: 646, SEQ ID NO: 647, SEQ ID NO: 648, SEQ ID NO: 649, SEQ ID NO: 650, SEQ ID NO: 651, SEQ ID NO: 652, SEQ ID NO: 653, SEQ ID NO: 654, SEQ ID NO: 655, SEQ ID NO: 656, SEQ ID NO: 657, SEQ ID NO: 658, SEQ ID NO: 659, SEQ ID NO: 660, SEQ ID NO: 661, SEQ ID NO: 662, SEQ ID NO: 663, SEQ ID NO: 664, SEQ ID NO: 665, SEQ ID NO: 666, SEQ ID NO: 667, SEQ ID NO: 668, SEQ ID NO: 669, SEQ ID NO: 670, SEQ ID NO: 671, SEQ ID NO: 672, SEQ ID NO: 673, SEQ ID NO: 674, SEQ ID NO: 675, SEQ ID NO: 676, SEQ ID NO: 677, SEQ ID NO: 678, SEQ ID NO: 679, SEQ ID NO: 680, SEQ ID NO: 681, SEQ ID NO: 682, SEQ ID NO: 683, SEQ ID NO: 684, SEQ ID NO: 685, SEQ ID NO: 686, SEQ ID NO: 687, SEQ ID NO: 688, SEQ ID NO: 689, SEQ ID NO: 690, SEQ ID NO: 691, SEQ ID NO: 692, SEQ ID NO: 693, SEQ ID NO: 694, SEQ ID NO: 695, or SEQ ID NO: 696.

[0675] In some examples of any of the ABPCs described herein, the first antigen-binding domain includes a light chain variable domain comprising SEQ ID NO: 713, and a heavy chain variable domain comprising: SEQ ID NO: 502, SEQ ID NO: 510, SEQ ID NO: 511, SEQ ID NO: 512, SEQ ID NO: 513, SEQ ID NO: 514, SEQ ID NO: 515, SEQ ID NO: 516, SEQ ID NO: 517, SEQ ID NO: 518, SEQ ID NO: 519, SEQ ID NO: 520, SEQ ID NO: 521, SEQ ID NO: 522, SEQ ID NO: 523, SEQ ID NO: 524, SEQ ID NO: 525, SEQ ID NO: 526, SEQ ID NO: 527, SEQ ID NO: 528, SEQ ID NO: 529, SEQ ID NO: 530, SEQ ID NO: 531, SEQ ID NO: 532, SEQ ID NO: 533, SEQ ID NO: 534, SEQ ID NO: 535, SEQ ID NO: 536, SEQ ID NO: 537, SEQ ID NO: 538, SEQ ID NO: 539, SEQ ID NO: 540, SEQ ID NO: 541, SEQ ID NO: 542, SEQ ID NO: 543, SEQ ID NO: 544, SEQ ID NO: 545, SEQ ID NO: 546, SEQ ID NO: 547, SEQ ID NO: 548, SEQ ID NO: 577, SEQ ID NO: 578, SEQ ID NO: 579, SEQ ID NO: 580, SEQ ID NO: 581, SEQ ID NO: 582, SEQ ID NO: 583, SEQ ID NO: 584, SEQ ID NO: 585, SEQ ID NO: 586, SEQ ID NO: 587, SEQ ID NO: 588, SEQ ID NO: 589, SEQ ID NO: 590, SEQ ID NO: 591, SEQ ID NO: 592, SEQ ID NO: 593, SEQ ID NO: 594, SEQ ID NO: 595, SEQ ID NO: 596, SEQ ID NO: 597, SEQ ID NO: 598, SEQ ID NO: 599, SEQ ID NO: 600, SEQ ID NO: 601, SEQ ID NO: 602, SEQ ID NO: 603, SEQ ID NO: 604, SEQ ID NO: 605, SEQ ID NO: 606, SEQ ID NO: 607, SEQ ID NO: 608, SEQ ID NO: 609, SEQ ID NO: 610, SEQ ID NO: 611, SEQ ID NO: 612, SEQ ID NO: 613, SEQ ID NO: 614, SEQ ID NO: 615, SEQ ID NO: 616, SEQ ID NO: 617, SEQ ID NO: 618, SEQ ID NO: 619, SEQ ID NO: 620, SEQ ID NO: 621, SEQ ID NO: 622, SEQ ID NO: 623, SEQ ID NO: 624, SEQ ID NO: 625, SEQ ID NO: 626, SEQ ID NO: 627, SEQ ID NO: 628, SEQ ID NO: 629, SEQ ID NO: 630, SEQ ID NO: 631, SEQ ID NO: 632, SEQ ID NO: 633, SEQ ID NO: 634, SEQ ID NO: 635, SEQ ID NO: 636, SEQ ID NO: 637, SEQ ID NO: 638, SEQ ID NO: 639, SEQ ID NO: 640, SEQ ID NO: 641, SEQ ID NO: 642, SEQ ID NO: 643, SEQ ID NO: 644, SEQ ID NO: 645, SEQ ID NO: 646, SEQ ID NO: 647, SEQ ID NO: 648, SEQ ID NO: 649, SEQ ID NO: 650, SEQ ID NO: 651, SEQ ID NO: 652, SEQ ID NO: 653, SEQ ID NO: 654, SEQ ID NO: 655, SEQ ID NO: 656, SEQ ID NO: 657, SEQ ID NO: 658, SEQ ID NO: 659, SEQ ID NO: 660, SEQ ID NO: 661, SEQ ID NO: 662, SEQ ID NO: 663, SEQ ID NO: 664, SEQ ID NO: 665, SEQ ID NO: 666, SEQ ID NO: 667, SEQ ID NO: 668, SEQ ID NO: 669, SEQ ID NO: 670, SEQ ID NO: 671, SEQ ID NO: 672, SEQ ID NO: 673, SEQ ID NO: 674, SEQ ID NO: 675, SEQ ID NO: 676, SEQ ID NO: 677, SEQ ID NO: 678, SEQ ID NO: 679, SEQ ID NO: 680, SEQ ID NO: 681, SEQ ID NO: 682, SEQ ID NO: 683, SEQ ID NO: 684, SEQ ID NO: 685, SEQ ID NO: 686, SEQ ID NO: 687, SEQ ID NO: 688, SEQ ID NO: 689, SEQ ID NO: 690, SEQ ID NO: 691, SEQ ID NO: 692, SEQ ID NO: 693, SEQ ID NO: 694, SEQ ID NO: 695, or SEQ ID NO: 696.

[0676] In some examples of any of the ABPCs described herein, the first antigen-binding domain includes a light chain variable domain comprising SEQ ID NO: 714, and a heavy chain variable domain comprising: SEQ ID NO: 502, SEQ ID NO: 510, SEQ ID NO: 511, SEQ ID NO: 512, SEQ ID NO: 513, SEQ ID NO: 514, SEQ ID NO: 515, SEQ ID NO: 516, SEQ ID NO: 517, SEQ ID NO: 518, SEQ ID NO: 519, SEQ ID NO: 520, SEQ ID NO: 521, SEQ ID NO: 522, SEQ ID NO: 523, SEQ ID NO: 524, SEQ ID NO: 525, SEQ ID NO: 526, SEQ ID NO: 527, SEQ ID NO: 528, SEQ ID NO: 529, SEQ ID NO: 530, SEQ ID NO: 531, SEQ ID NO: 532, SEQ ID NO: 533, SEQ ID NO: 534, SEQ ID NO: 535, SEQ ID NO: 536, SEQ ID NO: 537, SEQ ID NO: 538, SEQ ID NO: 539, SEQ ID NO: 540, SEQ ID NO: 541, SEQ ID NO: 542, SEQ ID NO: 543, SEQ ID NO: 544, SEQ ID NO: 545, SEQ ID NO: 546, SEQ ID NO: 547, SEQ ID NO: 548, SEQ ID NO: 577, SEQ ID NO: 578, SEQ ID NO: 579, SEQ ID NO: 580, SEQ ID NO: 581, SEQ ID NO: 582, SEQ ID NO: 583, SEQ ID NO: 584, SEQ ID NO: 585, SEQ ID NO: 586, SEQ ID NO: 587, SEQ ID NO: 588, SEQ ID NO: 589, SEQ ID NO: 590, SEQ ID NO: 591, SEQ ID NO: 592, SEQ ID NO: 593, SEQ ID NO: 594, SEQ ID NO: 595, SEQ ID NO: 596, SEQ ID NO: 597, SEQ ID NO: 598, SEQ ID NO: 599, SEQ ID NO: 600, SEQ ID NO: 601, SEQ ID NO: 602, SEQ ID NO: 603, SEQ ID NO: 604, SEQ ID NO: 605, SEQ ID NO: 606, SEQ ID NO: 607, SEQ ID NO: 608, SEQ ID NO: 609, SEQ ID NO: 610, SEQ ID NO: 611, SEQ ID NO: 612, SEQ ID NO: 613, SEQ ID NO: 614, SEQ ID NO: 615, SEQ ID NO: 616, SEQ ID NO: 617, SEQ ID NO: 618, SEQ ID NO: 619, SEQ ID NO: 620, SEQ ID NO: 621, SEQ ID NO: 622, SEQ ID NO: 623, SEQ ID NO: 624, SEQ ID NO: 625, SEQ ID NO: 626, SEQ ID NO: 627, SEQ ID NO: 628, SEQ ID NO: 629, SEQ ID NO: 630, SEQ ID NO: 631, SEQ ID NO: 632, SEQ ID NO: 633, SEQ ID NO: 634, SEQ ID NO: 635, SEQ ID NO: 636, SEQ ID NO: 637, SEQ ID NO: 638, SEQ ID NO: 639, SEQ ID NO: 640, SEQ ID NO: 641, SEQ ID NO: 642, SEQ ID NO: 643, SEQ ID NO: 644, SEQ ID NO: 645, SEQ ID NO: 646, SEQ ID NO: 647, SEQ ID NO: 648, SEQ ID NO: 649, SEQ ID NO: 650, SEQ ID NO: 651, SEQ ID NO: 652, SEQ ID NO: 653, SEQ ID NO: 654, SEQ ID NO: 655, SEQ ID NO: 656, SEQ ID NO: 657, SEQ ID NO: 658, SEQ ID NO: 659, SEQ ID NO: 660, SEQ ID NO: 661, SEQ ID NO: 662, SEQ ID NO: 663, SEQ ID NO: 664, SEQ ID NO: 665, SEQ ID NO: 666, SEQ ID NO: 667, SEQ ID NO: 668, SEQ ID NO: 669, SEQ ID NO: 670, SEQ ID NO: 671, SEQ ID NO: 672, SEQ ID NO: 673, SEQ ID NO: 674, SEQ ID NO: 675, SEQ ID NO: 676, SEQ ID NO: 677, SEQ ID NO: 678, SEQ ID NO: 679, SEQ ID NO: 680, SEQ ID NO: 681, SEQ ID NO: 682, SEQ ID NO: 683, SEQ ID NO: 684, SEQ ID NO: 685, SEQ ID NO: 686, SEQ ID NO: 687, SEQ ID NO: 688, SEQ ID NO: 689, SEQ ID NO: 690, SEQ ID NO: 691, SEQ ID NO: 692, SEQ ID NO: 693, SEQ ID NO: 694, SEQ ID NO: 695, or SEQ ID NO: 696.

[0677] In some examples of any of the ABPCs described herein, the first antigen-binding domain includes a light chain variable domain comprising SEQ ID NO: 715, and a heavy chain variable domain comprising: SEQ ID NO: 502, SEQ ID NO: 510, SEQ ID NO: 511, SEQ ID NO: 512, SEQ ID NO: 513, SEQ ID NO: 514, SEQ ID NO: 515, SEQ ID NO: 516, SEQ ID NO: 517, SEQ ID NO: 518, SEQ ID NO: 519, SEQ ID NO: 520, SEQ ID NO: 521, SEQ ID NO: 522, SEQ ID NO: 523, SEQ ID NO: 524, SEQ ID NO: 525, SEQ ID NO: 526, SEQ ID NO: 527, SEQ ID NO: 528, SEQ ID NO: 529, SEQ ID NO: 530, SEQ ID NO: 531, SEQ ID NO: 532, SEQ ID NO: 533, SEQ ID NO: 534, SEQ ID NO: 535, SEQ ID NO: 536, SEQ ID NO: 537, SEQ ID NO: 538, SEQ ID NO: 539, SEQ ID NO: 540, SEQ ID NO: 541, SEQ ID NO: 542, SEQ ID NO: 543, SEQ ID NO: 544, SEQ ID NO: 545, SEQ ID NO: 546, SEQ ID NO: 547, SEQ ID NO: 548, SEQ ID NO: 577, SEQ ID NO: 578, SEQ ID NO: 579, SEQ ID NO: 580, SEQ ID NO: 581, SEQ ID NO: 582, SEQ ID NO: 583, SEQ ID NO: 584, SEQ ID NO: 585, SEQ ID NO: 586, SEQ ID NO: 587, SEQ ID NO: 588, SEQ ID NO: 589, SEQ ID NO: 590, SEQ ID NO: 591, SEQ ID NO: 592, SEQ ID NO: 593, SEQ ID NO: 594, SEQ ID NO: 595, SEQ ID NO: 596, SEQ ID NO: 597, SEQ ID NO: 598, SEQ ID NO: 599, SEQ ID NO: 600, SEQ ID NO: 601, SEQ ID NO: 602, SEQ ID NO: 603, SEQ ID NO: 604, SEQ ID NO: 605, SEQ ID NO: 606, SEQ ID NO: 607, SEQ ID NO: 608, SEQ ID NO: 609, SEQ ID NO: 610, SEQ ID NO: 611, SEQ ID NO: 612, SEQ ID NO: 613, SEQ ID NO: 614, SEQ ID NO: 615, SEQ ID NO: 616, SEQ ID NO: 617, SEQ ID NO: 618, SEQ ID NO: 619, SEQ ID NO: 620, SEQ ID NO: 621, SEQ ID NO: 622, SEQ ID NO: 623, SEQ ID NO: 624, SEQ ID NO: 625, SEQ ID NO: 626, SEQ ID NO: 627, SEQ ID NO: 628, SEQ ID NO: 629, SEQ ID NO: 630, SEQ ID NO: 631, SEQ ID NO: 632, SEQ ID NO: 633, SEQ ID NO: 634, SEQ ID NO: 635, SEQ ID NO: 636, SEQ ID NO: 637, SEQ ID NO: 638, SEQ ID NO: 639, SEQ ID NO: 640, SEQ ID NO: 641, SEQ ID NO: 642, SEQ ID NO: 643, SEQ ID NO: 644, SEQ ID NO: 645, SEQ ID NO: 646, SEQ ID NO: 647, SEQ ID NO: 648, SEQ ID NO: 649, SEQ ID NO: 650, SEQ ID NO: 651, SEQ ID NO: 652, SEQ ID NO: 653, SEQ ID NO: 654, SEQ ID NO: 655, SEQ ID NO: 656, SEQ ID NO: 657, SEQ ID NO: 658, SEQ ID NO: 659, SEQ ID NO: 660, SEQ ID NO: 661, SEQ ID NO: 662, SEQ ID NO: 663, SEQ ID NO: 664, SEQ ID NO: 665, SEQ ID NO: 666, SEQ ID NO: 667, SEQ ID NO: 668, SEQ ID NO: 669, SEQ ID NO: 670, SEQ ID NO: 671, SEQ ID NO: 672, SEQ ID NO: 673, SEQ ID NO: 674, SEQ ID NO: 675, SEQ ID NO: 676, SEQ ID NO: 677, SEQ ID NO: 678, SEQ ID NO: 679, SEQ ID NO: 680, SEQ ID NO: 681, SEQ ID NO: 682, SEQ ID NO: 683, SEQ ID NO: 684, SEQ ID NO: 685, SEQ ID NO: 686, SEQ ID NO: 687, SEQ ID NO: 688, SEQ ID NO: 689, SEQ ID NO: 690, SEQ ID NO: 691, SEQ ID NO: 692, SEQ ID NO: 693, SEQ ID NO: 694, SEQ ID NO: 695, or SEQ ID NO: 696.

[0678] In some examples of any of the ABPCs described herein, the first antigen-binding domain includes a light chain variable domain comprising SEQ ID NO: 716, and a heavy chain variable domain comprising: SEQ ID NO: 502, SEQ ID NO: 510, SEQ ID NO: 511, SEQ ID NO: 512, SEQ ID NO: 513, SEQ ID NO: 514, SEQ ID NO: 515, SEQ ID NO: 516, SEQ ID NO: 517, SEQ ID NO: 518, SEQ ID NO: 519, SEQ ID NO: 520, SEQ ID NO: 521, SEQ ID NO: 522, SEQ ID NO: 523, SEQ ID NO: 524, SEQ ID NO: 525, SEQ ID NO: 526, SEQ ID NO: 527, SEQ ID NO: 528, SEQ ID NO: 529, SEQ ID NO: 530, SEQ ID NO: 531, SEQ ID NO: 532, SEQ ID NO: 533, SEQ ID NO: 534, SEQ ID NO: 535, SEQ ID NO: 536, SEQ ID NO: 537, SEQ ID NO: 538, SEQ ID NO: 539, SEQ ID NO: 540, SEQ ID NO: 541, SEQ ID NO: 542, SEQ ID NO: 543, SEQ ID NO: 544, SEQ ID NO: 545, SEQ ID NO: 546, SEQ ID NO: 547, SEQ ID NO: 548, SEQ ID NO: 577, SEQ ID NO: 578, SEQ ID NO: 579, SEQ ID NO: 580, SEQ ID NO: 581, SEQ ID NO: 582, SEQ ID NO: 583, SEQ ID NO: 584, SEQ ID NO: 585, SEQ ID NO: 586, SEQ ID NO: 587, SEQ ID NO: 588, SEQ ID NO: 589, SEQ ID NO: 590, SEQ ID NO: 591, SEQ ID NO: 592, SEQ ID NO: 593, SEQ ID NO: 594, SEQ ID NO: 595, SEQ ID NO: 596, SEQ ID NO: 597, SEQ ID NO: 598, SEQ ID NO: 599, SEQ ID NO: 600, SEQ ID NO: 601, SEQ ID NO: 602, SEQ ID NO: 603, SEQ ID NO: 604, SEQ ID NO: 605, SEQ ID NO: 606, SEQ ID NO: 607, SEQ ID NO: 608, SEQ ID NO: 609, SEQ ID NO: 610, SEQ ID NO: 611, SEQ ID NO: 612, SEQ ID NO: 613, SEQ ID NO: 614, SEQ ID NO: 615, SEQ ID NO: 616, SEQ ID NO: 617, SEQ ID NO: 618, SEQ ID NO: 619, SEQ ID NO: 620, SEQ ID NO: 621, SEQ ID NO: 622, SEQ ID NO: 623, SEQ ID NO: 624, SEQ ID NO: 625, SEQ ID NO: 626, SEQ ID NO: 627, SEQ ID NO: 628, SEQ ID NO: 629, SEQ ID NO: 630, SEQ ID NO: 631, SEQ ID NO: 632, SEQ ID NO: 633, SEQ ID NO: 634, SEQ ID NO: 635, SEQ ID NO: 636, SEQ ID NO: 637, SEQ ID NO: 638, SEQ ID NO: 639, SEQ ID NO: 640, SEQ ID NO: 641, SEQ ID NO: 642, SEQ ID NO: 643, SEQ ID NO: 644, SEQ ID NO: 645, SEQ ID NO: 646, SEQ ID NO: 647, SEQ ID NO: 648, SEQ ID NO: 649, SEQ ID NO: 650, SEQ ID NO: 651, SEQ ID NO: 652, SEQ ID NO: 653, SEQ ID NO: 654, SEQ ID NO: 655, SEQ ID NO: 656, SEQ ID NO: 657, SEQ ID NO: 658, SEQ ID NO: 659, SEQ ID NO: 660, SEQ ID NO: 661, SEQ ID NO: 662, SEQ ID NO: 663, SEQ ID NO: 664, SEQ ID NO: 665, SEQ ID NO: 666, SEQ ID NO: 667, SEQ ID NO: 668, SEQ ID NO: 669, SEQ ID NO: 670, SEQ ID NO: 671, SEQ ID NO: 672, SEQ ID NO: 673, SEQ ID NO: 674, SEQ ID NO: 675, SEQ ID NO: 676, SEQ ID NO: 677, SEQ ID NO: 678, SEQ ID NO: 679, SEQ ID NO: 680, SEQ ID NO: 681, SEQ ID NO: 682, SEQ ID NO: 683, SEQ ID NO: 684, SEQ ID NO: 685, SEQ ID NO: 686, SEQ ID NO: 687, SEQ ID NO: 688, SEQ ID NO: 689, SEQ ID NO: 690, SEQ ID NO: 691, SEQ ID NO: 692, SEQ ID NO: 693, SEQ ID NO: 694, SEQ ID NO: 695, or SEQ ID NO: 696.

[0679] In some examples of any of the ABPCs described herein, the first antigen-binding domain includes a light chain variable domain comprising SEQ ID NO: 717, and a heavy chain variable domain comprising: SEQ ID NO: 502, SEQ ID NO: 510, SEQ ID NO: 511, SEQ ID NO: 512, SEQ ID NO: 513, SEQ ID NO: 514, SEQ ID NO: 515, SEQ ID NO: 516, SEQ ID NO: 517, SEQ ID NO: 518, SEQ ID NO: 519, SEQ ID NO: 520, SEQ ID NO: 521, SEQ ID NO: 522, SEQ ID NO: 523, SEQ ID NO: 524, SEQ ID NO: 525, SEQ ID NO: 526, SEQ ID NO: 527, SEQ ID NO: 528, SEQ ID NO: 529, SEQ ID NO: 530, SEQ ID NO: 531, SEQ ID NO: 532, SEQ ID NO: 533, SEQ ID NO: 534, SEQ ID NO: 535, SEQ ID NO: 536, SEQ ID NO: 537, SEQ ID NO: 538, SEQ ID NO: 539, SEQ ID NO: 540, SEQ ID NO: 541, SEQ ID NO: 542, SEQ ID NO: 543, SEQ ID NO: 544, SEQ ID NO: 545, SEQ ID NO: 546, SEQ ID NO: 547, SEQ ID NO: 548, SEQ ID NO: 577, SEQ ID NO: 578, SEQ ID NO: 579, SEQ ID NO: 580, SEQ ID NO: 581, SEQ ID NO: 582, SEQ ID NO: 583, SEQ ID NO: 584, SEQ ID NO: 585, SEQ ID NO: 586, SEQ ID NO: 587, SEQ ID NO: 588, SEQ ID NO: 589, SEQ ID NO: 590, SEQ ID NO: 591, SEQ ID NO: 592, SEQ ID NO: 593, SEQ ID NO: 594, SEQ ID NO: 595, SEQ ID NO: 596, SEQ ID NO: 597, SEQ ID NO: 598, SEQ ID NO: 599, SEQ ID NO: 600, SEQ ID NO: 601, SEQ ID NO: 602, SEQ ID NO: 603, SEQ ID NO: 604, SEQ ID NO: 605, SEQ ID NO: 606, SEQ ID NO: 607, SEQ ID NO: 608, SEQ ID NO: 609, SEQ ID NO: 610, SEQ ID NO: 611, SEQ ID NO: 612, SEQ ID NO: 613, SEQ ID NO: 614, SEQ ID NO: 615, SEQ ID NO: 616, SEQ ID NO: 617, SEQ ID NO: 618, SEQ ID NO: 619, SEQ ID NO: 620, SEQ ID NO: 621, SEQ ID NO: 622, SEQ ID NO: 623, SEQ ID NO: 624, SEQ ID NO: 625, SEQ ID NO: 626, SEQ ID NO: 627, SEQ ID NO: 628, SEQ ID NO: 629, SEQ ID NO: 630, SEQ ID NO: 631, SEQ ID NO: 632, SEQ ID NO: 633, SEQ ID NO: 634, SEQ ID NO: 635, SEQ ID NO: 636, SEQ ID NO: 637, SEQ ID NO: 638, SEQ ID NO: 639, SEQ ID NO: 640, SEQ ID NO: 641, SEQ ID NO: 642, SEQ ID NO: 643, SEQ ID NO: 644, SEQ ID NO: 645, SEQ ID NO: 646, SEQ ID NO: 647, SEQ ID NO: 648, SEQ ID NO: 649, SEQ ID NO: 650, SEQ ID NO: 651, SEQ ID NO: 652, SEQ ID NO: 653, SEQ ID NO: 654, SEQ ID NO: 655, SEQ ID NO: 656, SEQ ID NO: 657, SEQ ID NO: 658, SEQ ID NO: 659, SEQ ID NO: 660, SEQ ID NO: 661, SEQ ID NO: 662, SEQ ID NO: 663, SEQ ID NO: 664, SEQ ID NO: 665, SEQ ID NO: 666, SEQ ID NO: 667, SEQ ID NO: 668, SEQ ID NO: 669, SEQ ID NO: 670, SEQ ID NO: 671, SEQ ID NO: 672, SEQ ID NO: 673, SEQ ID NO: 674, SEQ ID NO: 675, SEQ ID NO: 676, SEQ ID NO: 677, SEQ ID NO: 678, SEQ ID NO: 679, SEQ ID NO: 680, SEQ ID NO: 681, SEQ ID NO: 682, SEQ ID NO: 683, SEQ ID NO: 684, SEQ ID NO: 685, SEQ ID NO: 686, SEQ ID NO: 687, SEQ ID NO: 688, SEQ ID NO: 689, SEQ ID NO: 690, SEQ ID NO: 691, SEQ ID NO: 692, SEQ ID NO: 693, SEQ ID NO: 694, SEQ ID NO: 695, or SEQ ID NO: 696.

[0680] In some examples of any of the ABPCs described herein, the first antigen-binding domain includes a light chain variable domain comprising SEQ ID NO: 718, and a heavy chain variable domain comprising: SEQ ID NO: 502, SEQ ID NO: 510, SEQ ID NO: 511, SEQ ID NO: 512, SEQ ID NO: 513, SEQ ID NO: 514, SEQ ID NO: 515, SEQ ID NO: 516, SEQ ID NO: 517, SEQ ID NO: 518, SEQ ID NO: 519, SEQ ID NO: 520, SEQ ID NO: 521, SEQ ID NO: 522, SEQ ID NO: 523, SEQ ID NO: 524, SEQ ID NO: 525, SEQ ID NO: 526, SEQ ID NO: 527, SEQ ID NO: 528, SEQ ID NO: 529, SEQ ID NO: 530, SEQ ID NO: 531, SEQ ID NO: 532, SEQ ID NO: 533, SEQ ID NO: 534, SEQ ID NO: 535, SEQ ID NO: 536, SEQ ID NO: 537, SEQ ID NO: 538, SEQ ID NO: 539, SEQ ID NO: 540, SEQ ID NO: 541, SEQ ID NO: 542, SEQ ID NO: 543, SEQ ID NO: 544, SEQ ID NO: 545, SEQ ID NO: 546, SEQ ID NO: 547, SEQ ID NO: 548, SEQ ID NO: 577, SEQ ID NO: 578, SEQ ID NO: 579, SEQ ID NO: 580, SEQ ID NO: 581, SEQ ID NO: 582, SEQ ID NO: 583, SEQ ID NO: 584, SEQ ID NO: 585, SEQ ID NO: 586, SEQ ID NO: 587, SEQ ID NO: 588, SEQ ID NO: 589, SEQ ID NO: 590, SEQ ID NO: 591, SEQ ID NO: 592, SEQ ID NO: 593, SEQ ID NO: 594, SEQ ID NO: 595, SEQ ID NO: 596, SEQ ID NO: 597, SEQ ID NO: 598, SEQ ID NO: 599, SEQ ID NO: 600, SEQ ID NO: 601, SEQ ID NO: 602, SEQ ID NO: 603, SEQ ID NO: 604, SEQ ID NO: 605, SEQ ID NO: 606, SEQ ID NO: 607, SEQ ID NO: 608, SEQ ID NO: 609, SEQ ID NO: 610, SEQ ID NO: 611, SEQ ID NO: 612, SEQ ID NO: 613, SEQ ID NO: 614, SEQ ID NO: 615, SEQ ID NO: 616, SEQ ID NO: 617, SEQ ID NO: 618, SEQ ID NO: 619, SEQ ID NO: 620, SEQ ID NO: 621, SEQ ID NO: 622, SEQ ID NO: 623, SEQ ID NO: 624, SEQ ID NO: 625, SEQ ID NO: 626, SEQ ID NO: 627, SEQ ID NO: 628, SEQ ID NO: 629, SEQ ID NO: 630, SEQ ID NO: 631, SEQ ID NO: 632, SEQ ID NO: 633, SEQ ID NO: 634, SEQ ID NO: 635, SEQ ID NO: 636, SEQ ID NO: 637, SEQ ID NO: 638, SEQ ID NO: 639, SEQ ID NO: 640, SEQ ID NO: 641, SEQ ID NO: 642, SEQ ID NO: 643, SEQ ID NO: 644, SEQ ID NO: 645, SEQ ID NO: 646, SEQ ID NO: 647, SEQ ID NO: 648, SEQ ID NO: 649, SEQ ID NO: 650, SEQ ID NO: 651, SEQ ID NO: 652, SEQ ID NO: 653, SEQ ID NO: 654, SEQ ID NO: 655, SEQ ID NO: 656, SEQ ID NO: 657, SEQ ID NO: 658, SEQ ID NO: 659, SEQ ID NO: 660, SEQ ID NO: 661, SEQ ID NO: 662, SEQ ID NO: 663, SEQ ID NO: 664, SEQ ID NO: 665, SEQ ID NO: 666, SEQ ID NO: 667, SEQ ID NO: 668, SEQ ID NO: 669, SEQ ID NO: 670, SEQ ID NO: 671, SEQ ID NO: 672, SEQ ID NO: 673, SEQ ID NO: 674, SEQ ID NO: 675, SEQ ID NO: 676, SEQ ID NO: 677, SEQ ID NO: 678, SEQ ID NO: 679, SEQ ID NO: 680, SEQ ID NO: 681, SEQ ID NO: 682, SEQ ID NO: 683, SEQ ID NO: 684, SEQ ID NO: 685, SEQ ID NO: 686, SEQ ID NO: 687, SEQ ID NO: 688, SEQ ID NO: 689, SEQ ID NO: 690, SEQ ID NO: 691, SEQ ID NO: 692, SEQ ID NO: 693, SEQ ID NO: 694, SEQ ID NO: 695, or SEQ ID NO: 696.

[0681] In some examples of any of the ABPCs described herein, the first antigen-binding domain includes a light chain variable domain comprising SEQ ID NO: 719, and a heavy chain variable domain comprising: SEQ ID NO: 502, SEQ ID NO: 510, SEQ ID NO: 511, SEQ ID NO: 512, SEQ ID NO: 513, SEQ ID NO: 514, SEQ ID NO: 515, SEQ ID NO: 516, SEQ ID NO: 517, SEQ ID NO: 518, SEQ ID NO: 519, SEQ ID NO: 520, SEQ ID NO: 521, SEQ ID NO: 522, SEQ ID NO: 523, SEQ ID NO: 524, SEQ ID NO: 525, SEQ ID NO: 526, SEQ ID NO: 527, SEQ ID NO: 528, SEQ ID NO: 529, SEQ ID NO: 530, SEQ ID NO: 531, SEQ ID NO: 532, SEQ ID NO: 533, SEQ ID NO: 534, SEQ ID NO: 535, SEQ ID NO: 536, SEQ ID NO: 537, SEQ ID NO: 538, SEQ ID NO: 539, SEQ ID NO: 540, SEQ ID NO: 541, SEQ ID NO: 542, SEQ ID NO: 543, SEQ ID NO: 544, SEQ ID NO: 545, SEQ ID NO: 546, SEQ ID NO: 547, SEQ ID NO: 548, SEQ ID NO: 577, SEQ ID NO: 578, SEQ ID NO: 579, SEQ ID NO: 580, SEQ ID NO: 581, SEQ ID NO: 582, SEQ ID NO: 583, SEQ ID NO: 584, SEQ ID NO: 585, SEQ ID NO: 586, SEQ ID NO: 587, SEQ ID NO: 588, SEQ ID NO: 589, SEQ ID NO: 590, SEQ ID NO: 591, SEQ ID NO: 592, SEQ ID NO: 593, SEQ ID NO: 594, SEQ ID NO: 595, SEQ ID NO: 596, SEQ ID NO: 597, SEQ ID NO: 598, SEQ ID NO: 599, SEQ ID NO: 600, SEQ ID NO: 601, SEQ ID NO: 602, SEQ ID NO: 603, SEQ ID NO: 604, SEQ ID NO: 605, SEQ ID NO: 606, SEQ ID NO: 607, SEQ ID NO: 608, SEQ ID NO: 609, SEQ ID NO: 610, SEQ ID NO: 611, SEQ ID NO: 612, SEQ ID NO: 613, SEQ ID NO: 614, SEQ ID NO: 615, SEQ ID NO: 616, SEQ ID NO: 617, SEQ ID NO: 618, SEQ ID NO: 619, SEQ ID NO: 620, SEQ ID NO: 621, SEQ ID NO: 622, SEQ ID NO: 623, SEQ ID NO: 624, SEQ ID NO: 625, SEQ ID NO: 626, SEQ ID NO: 627, SEQ ID NO: 628, SEQ ID NO: 629, SEQ ID NO: 630, SEQ ID NO: 631, SEQ ID NO: 632, SEQ ID NO: 633, SEQ ID NO: 634, SEQ ID NO: 635, SEQ ID NO: 636, SEQ ID NO: 637, SEQ ID NO: 638, SEQ ID NO: 639, SEQ ID NO: 640, SEQ ID NO: 641, SEQ ID NO: 642, SEQ ID NO: 643, SEQ ID NO: 644, SEQ ID NO: 645, SEQ ID NO: 646, SEQ ID NO: 647, SEQ ID NO: 648, SEQ ID NO: 649, SEQ ID NO: 650, SEQ ID NO: 651, SEQ ID NO: 652, SEQ ID NO: 653, SEQ ID NO: 654, SEQ ID NO: 655, SEQ ID NO: 656, SEQ ID NO: 657, SEQ ID NO: 658, SEQ ID NO: 659, SEQ ID NO: 660, SEQ ID NO: 661, SEQ ID NO: 662, SEQ ID NO: 663, SEQ ID NO: 664, SEQ ID NO: 665, SEQ ID NO: 666, SEQ ID NO: 667, SEQ ID NO: 668, SEQ ID NO: 669, SEQ ID NO: 670, SEQ ID NO: 671, SEQ ID NO: 672, SEQ ID NO: 673, SEQ ID NO: 674, SEQ ID NO: 675, SEQ ID NO: 676, SEQ ID NO: 677, SEQ ID NO: 678, SEQ ID NO: 679, SEQ ID NO: 680, SEQ ID NO: 681, SEQ ID NO: 682, SEQ ID NO: 683, SEQ ID NO: 684, SEQ ID NO: 685, SEQ ID NO: 686, SEQ ID NO: 687, SEQ ID NO: 688, SEQ ID NO: 689, SEQ ID NO: 690, SEQ ID NO: 691, SEQ ID NO: 692, SEQ ID NO: 693, SEQ ID NO: 694, SEQ ID NO: 695, or SEQ ID NO: 696.

[0682] In some examples of any of the ABPCs described herein, the first antigen-binding domain includes a light chain variable domain comprising SEQ ID NO: 720, and a heavy chain variable domain comprising: SEQ ID NO: 502, SEQ ID NO: 510, SEQ ID NO: 511, SEQ ID NO: 512, SEQ ID NO: 513, SEQ ID NO: 514, SEQ ID NO: 515, SEQ ID NO: 516, SEQ ID NO: 517, SEQ ID NO: 518, SEQ ID NO: 519, SEQ ID NO: 520, SEQ ID NO: 521, SEQ ID NO: 522, SEQ ID NO: 523, SEQ ID NO: 524, SEQ ID NO: 525, SEQ ID NO: 526, SEQ ID NO: 527, SEQ ID NO: 528, SEQ ID NO: 529, SEQ ID NO: 530, SEQ ID NO: 531, SEQ ID NO: 532, SEQ ID NO: 533, SEQ ID NO: 534, SEQ ID NO: 535, SEQ ID NO: 536, SEQ ID NO: 537, SEQ ID NO: 538, SEQ ID NO: 539, SEQ ID NO: 540, SEQ ID NO: 541, SEQ ID NO: 542, SEQ ID NO: 543, SEQ ID NO: 544, SEQ ID NO: 545, SEQ ID NO: 546, SEQ ID NO: 547, SEQ ID NO: 548, SEQ ID NO: 577, SEQ ID NO: 578, SEQ ID NO: 579, SEQ ID NO: 580, SEQ ID NO: 581, SEQ ID NO: 582, SEQ ID NO: 583, SEQ ID NO: 584, SEQ ID NO: 585, SEQ ID NO: 586, SEQ ID NO: 587, SEQ ID NO: 588, SEQ ID NO: 589, SEQ ID NO: 590, SEQ ID NO: 591, SEQ ID NO: 592, SEQ ID NO: 593, SEQ ID NO: 594, SEQ ID NO: 595, SEQ ID NO: 596, SEQ ID NO: 597, SEQ ID NO: 598, SEQ ID NO: 599, SEQ ID NO: 600, SEQ ID NO: 601, SEQ ID NO: 602, SEQ ID NO: 603, SEQ ID NO: 604, SEQ ID NO: 605, SEQ ID NO: 606, SEQ ID NO: 607, SEQ ID NO: 608, SEQ ID NO: 609, SEQ ID NO: 610, SEQ ID NO: 611, SEQ ID NO: 612, SEQ ID NO: 613, SEQ ID NO: 614, SEQ ID NO: 615, SEQ ID NO: 616, SEQ ID NO: 617, SEQ ID NO: 618, SEQ ID NO: 619, SEQ ID NO: 620, SEQ ID NO: 621, SEQ ID NO: 622, SEQ ID NO: 623, SEQ ID NO: 624, SEQ ID NO: 625, SEQ ID NO: 626, SEQ ID NO: 627, SEQ ID NO: 628, SEQ ID NO: 629, SEQ ID NO: 630, SEQ ID NO: 631, SEQ ID NO: 632, SEQ ID NO: 633, SEQ ID NO: 634, SEQ ID NO: 635, SEQ ID NO: 636, SEQ ID NO: 637, SEQ ID NO: 638, SEQ ID NO: 639, SEQ ID NO: 640, SEQ ID NO: 641, SEQ ID NO: 642, SEQ ID NO: 643, SEQ ID NO: 644, SEQ ID NO: 645, SEQ ID NO: 646, SEQ ID NO: 647, SEQ ID NO: 648, SEQ ID NO: 649, SEQ ID NO: 650, SEQ ID NO: 651, SEQ ID NO: 652, SEQ ID NO: 653, SEQ ID NO: 654, SEQ ID NO: 655, SEQ ID NO: 656, SEQ ID NO: 657, SEQ ID NO: 658, SEQ ID NO: 659, SEQ ID NO: 660, SEQ ID NO: 661, SEQ ID NO: 662, SEQ ID NO: 663, SEQ ID NO: 664, SEQ ID NO: 665, SEQ ID NO: 666, SEQ ID NO: 667, SEQ ID NO: 668, SEQ ID NO: 669, SEQ ID NO: 670, SEQ ID NO: 671, SEQ ID NO: 672, SEQ ID NO: 673, SEQ ID NO: 674, SEQ ID NO: 675, SEQ ID NO: 676, SEQ ID NO: 677, SEQ ID NO: 678, SEQ ID NO: 679, SEQ ID NO: 680, SEQ ID NO: 681, SEQ ID NO: 682, SEQ ID NO: 683, SEQ ID NO: 684, SEQ ID NO: 685, SEQ ID NO: 686, SEQ ID NO: 687, SEQ ID NO: 688, SEQ ID NO: 689, SEQ ID NO: 690, SEQ ID NO: 691, SEQ ID NO: 692, SEQ ID NO: 693, SEQ ID NO: 694, SEQ ID NO: 695, or SEQ ID NO: 696.

[0683] In some examples of any of the ABPCs described herein, the first antigen-binding domain includes a light chain variable domain comprising SEQ ID NO: 721, and a heavy chain variable domain comprising: SEQ ID NO: 502, SEQ ID NO: 510, SEQ ID NO: 511, SEQ ID NO: 512, SEQ ID NO: 513, SEQ ID NO: 514, SEQ ID NO: 515, SEQ ID NO: 516, SEQ ID NO: 517, SEQ ID NO: 518, SEQ ID NO: 519, SEQ ID NO: 520, SEQ ID NO: 521, SEQ ID NO: 522, SEQ ID NO: 523, SEQ ID NO: 524, SEQ ID NO: 525, SEQ ID NO: 526, SEQ ID NO: 527, SEQ ID NO: 528, SEQ ID NO: 529, SEQ ID NO: 530, SEQ ID NO: 531, SEQ ID NO: 532, SEQ ID NO: 533, SEQ ID NO: 534, SEQ ID NO: 535, SEQ ID NO: 536, SEQ ID NO: 537, SEQ ID NO: 538, SEQ ID NO: 539, SEQ ID NO: 540, SEQ ID NO: 541, SEQ ID NO: 542, SEQ ID NO: 543, SEQ ID NO: 544, SEQ ID NO: 545, SEQ ID NO: 546, SEQ ID NO: 547, SEQ ID NO: 548, SEQ ID NO: 577, SEQ ID NO: 578, SEQ ID NO: 579, SEQ ID NO: 580, SEQ ID NO: 581, SEQ ID NO: 582, SEQ ID NO: 583, SEQ ID NO: 584, SEQ ID NO: 585, SEQ ID NO: 586, SEQ ID NO: 587, SEQ ID NO: 588, SEQ ID NO: 589, SEQ ID NO: 590, SEQ ID NO: 591, SEQ ID NO: 592, SEQ ID NO: 593, SEQ ID NO: 594, SEQ ID NO: 595, SEQ ID NO: 596, SEQ ID NO: 597, SEQ ID NO: 598, SEQ ID NO: 599, SEQ ID NO: 600, SEQ ID NO: 601, SEQ ID NO: 602, SEQ ID NO: 603, SEQ ID NO: 604, SEQ ID NO: 605, SEQ ID NO: 606, SEQ ID NO: 607, SEQ ID NO: 608, SEQ ID NO: 609, SEQ ID NO: 610, SEQ ID NO: 611, SEQ ID NO: 612, SEQ ID NO: 613, SEQ ID NO: 614, SEQ ID NO: 615, SEQ ID NO: 616, SEQ ID NO: 617, SEQ ID NO: 618, SEQ ID NO: 619, SEQ ID NO: 620, SEQ ID NO: 621, SEQ ID NO: 622, SEQ ID NO: 623, SEQ ID NO: 624, SEQ ID NO: 625, SEQ ID NO: 626, SEQ ID NO: 627, SEQ ID NO: 628, SEQ ID NO: 629, SEQ ID NO: 630, SEQ ID NO: 631, SEQ ID NO: 632, SEQ ID NO: 633, SEQ ID NO: 634, SEQ ID NO: 635, SEQ ID NO: 636, SEQ ID NO: 637, SEQ ID NO: 638, SEQ ID NO: 639, SEQ ID NO: 640, SEQ ID NO: 641, SEQ ID NO: 642, SEQ ID NO: 643, SEQ ID NO: 644, SEQ ID NO: 645, SEQ ID NO: 646, SEQ ID NO: 647, SEQ ID NO: 648, SEQ ID NO: 649, SEQ ID NO: 650, SEQ ID NO: 651, SEQ ID NO: 652, SEQ ID NO: 653, SEQ ID NO: 654, SEQ ID NO: 655, SEQ ID NO: 656, SEQ ID NO: 657, SEQ ID NO: 658, SEQ ID NO: 659, SEQ ID NO: 660, SEQ ID NO: 661, SEQ ID NO: 662, SEQ ID NO: 663, SEQ ID NO: 664, SEQ ID NO: 665, SEQ ID NO: 666, SEQ ID NO: 667, SEQ ID NO: 668, SEQ ID NO: 669, SEQ ID NO: 670, SEQ ID NO: 671, SEQ ID NO: 672, SEQ ID NO: 673, SEQ ID NO: 674, SEQ ID NO: 675, SEQ ID NO: 676, SEQ ID NO: 677, SEQ ID NO: 678, SEQ ID NO: 679, SEQ ID NO: 680, SEQ ID NO: 681, SEQ ID NO: 682, SEQ ID NO: 683, SEQ ID NO: 684, SEQ ID NO: 685, SEQ ID NO: 686, SEQ ID NO: 687, SEQ ID NO: 688, SEQ ID NO: 689, SEQ ID NO: 690, SEQ ID NO: 691, SEQ ID NO: 692, SEQ ID NO: 693, SEQ ID NO: 694, SEQ ID NO: 695, or SEQ ID NO: 696.

[0684] In some examples of any of the ABPCs described herein, the first antigen-binding domain includes a light chain variable domain comprising SEQ ID NO: 722, and a heavy chain variable domain comprising: SEQ ID NO: 502, SEQ ID NO: 510, SEQ ID NO: 511, SEQ ID NO: 512, SEQ ID NO: 513, SEQ ID NO: 514, SEQ ID NO: 515, SEQ ID NO: 516, SEQ ID NO: 517, SEQ ID NO: 518, SEQ ID NO: 519, SEQ ID NO: 520, SEQ ID NO: 521, SEQ ID NO: 522, SEQ ID NO: 523, SEQ ID NO: 524, SEQ ID NO: 525, SEQ ID NO: 526, SEQ ID NO: 527, SEQ ID NO: 528, SEQ ID NO: 529, SEQ ID NO: 530, SEQ ID NO: 531, SEQ ID NO: 532, SEQ ID NO: 533, SEQ ID NO: 534, SEQ ID NO: 535, SEQ ID NO: 536, SEQ ID NO: 537, SEQ ID NO: 538, SEQ ID NO: 539, SEQ ID NO: 540, SEQ ID NO: 541, SEQ ID NO: 542, SEQ ID NO: 543, SEQ ID NO: 544, SEQ ID NO: 545, SEQ ID NO: 546, SEQ ID NO: 547, SEQ ID NO: 548, SEQ ID NO: 577, SEQ ID NO: 578, SEQ ID NO: 579, SEQ ID NO: 580, SEQ ID NO: 581, SEQ ID NO: 582, SEQ ID NO: 583, SEQ ID NO: 584, SEQ ID NO: 585, SEQ ID NO: 586, SEQ ID NO: 587, SEQ ID NO: 588, SEQ ID NO: 589, SEQ ID NO: 590, SEQ ID NO: 591, SEQ ID NO: 592, SEQ ID NO: 593, SEQ ID NO: 594, SEQ ID NO: 595, SEQ ID NO: 596, SEQ ID NO: 597, SEQ ID NO: 598, SEQ ID NO: 599, SEQ ID NO: 600, SEQ ID NO: 601, SEQ ID NO: 602, SEQ ID NO: 603, SEQ ID NO: 604, SEQ ID NO: 605, SEQ ID NO: 606, SEQ ID NO: 607, SEQ ID NO: 608, SEQ ID NO: 609, SEQ ID NO: 610, SEQ ID NO: 611, SEQ ID NO: 612, SEQ ID NO: 613, SEQ ID NO: 614, SEQ ID NO: 615, SEQ ID NO: 616, SEQ ID NO: 617, SEQ ID NO: 618, SEQ ID NO: 619, SEQ ID NO: 620, SEQ ID NO: 621, SEQ ID NO: 622, SEQ ID NO: 623, SEQ ID NO: 624, SEQ ID NO: 625, SEQ ID NO: 626, SEQ ID NO: 627, SEQ ID NO: 628, SEQ ID NO: 629, SEQ ID NO: 630, SEQ ID NO: 631, SEQ ID NO: 632, SEQ ID NO: 633, SEQ ID NO: 634, SEQ ID NO: 635, SEQ ID NO: 636, SEQ ID NO: 637, SEQ ID NO: 638, SEQ ID NO: 639, SEQ ID NO: 640, SEQ ID NO: 641, SEQ ID NO: 642, SEQ ID NO: 643, SEQ ID NO: 644, SEQ ID NO: 645, SEQ ID NO: 646, SEQ ID NO: 647, SEQ ID NO: 648, SEQ ID NO: 649, SEQ ID NO: 650, SEQ ID NO: 651, SEQ ID NO: 652, SEQ ID NO: 653, SEQ ID NO: 654, SEQ ID NO: 655, SEQ ID NO: 656, SEQ ID NO: 657, SEQ ID NO: 658, SEQ ID NO: 659, SEQ ID NO: 660, SEQ ID NO: 661, SEQ ID NO: 662, SEQ ID NO: 663, SEQ ID NO: 664, SEQ ID NO: 665, SEQ ID NO: 666, SEQ ID NO: 667, SEQ ID NO: 668, SEQ ID NO: 669, SEQ ID NO: 670, SEQ ID NO: 671, SEQ ID NO: 672, SEQ ID NO: 673, SEQ ID NO: 674, SEQ ID NO: 675, SEQ ID NO: 676, SEQ ID NO: 677, SEQ ID NO: 678, SEQ ID NO: 679, SEQ ID NO: 680, SEQ ID NO: 681, SEQ ID NO: 682, SEQ ID NO: 683, SEQ ID NO: 684, SEQ ID NO: 685, SEQ ID NO: 686, SEQ ID NO: 687, SEQ ID NO: 688, SEQ ID NO: 689, SEQ ID NO: 690, SEQ ID NO: 691, SEQ ID NO: 692, SEQ ID NO: 693, SEQ ID NO: 694, SEQ ID NO: 695, or SEQ ID NO: 696.

[0685] In some examples of any of the ABPCs described herein, the first antigen-binding domain includes a light chain variable domain comprising SEQ ID NO: 723, and a heavy chain variable domain comprising: SEQ ID NO: 502, SEQ ID NO: 510, SEQ ID NO: 511, SEQ ID NO: 512, SEQ ID NO: 513, SEQ ID NO: 514, SEQ ID NO: 515, SEQ ID NO: 516, SEQ ID NO: 517, SEQ ID NO: 518, SEQ ID NO: 519, SEQ ID NO: 520, SEQ ID NO: 521, SEQ ID NO: 522, SEQ ID NO: 523, SEQ ID NO: 524, SEQ ID NO: 525, SEQ ID NO: 526, SEQ ID NO: 527, SEQ ID NO: 528, SEQ ID NO: 529, SEQ ID NO: 530, SEQ ID NO: 531, SEQ ID NO: 532, SEQ ID NO: 533, SEQ ID NO: 534, SEQ ID NO: 535, SEQ ID NO: 536, SEQ ID NO: 537, SEQ ID NO: 538, SEQ ID NO: 539, SEQ ID NO: 540, SEQ ID NO: 541, SEQ ID NO: 542, SEQ ID NO: 543, SEQ ID NO: 544, SEQ ID NO: 545, SEQ ID NO: 546, SEQ ID NO: 547, SEQ ID NO: 548, SEQ ID NO: 577, SEQ ID NO: 578, SEQ ID NO: 579, SEQ ID NO: 580, SEQ ID NO: 581, SEQ ID NO: 582, SEQ ID NO: 583, SEQ ID NO: 584, SEQ ID NO: 585, SEQ ID NO: 586, SEQ ID NO: 587, SEQ ID NO: 588, SEQ ID NO: 589, SEQ ID NO: 590, SEQ ID NO: 591, SEQ ID NO: 592, SEQ ID NO: 593, SEQ ID NO: 594, SEQ ID NO: 595, SEQ ID NO: 596, SEQ ID NO: 597, SEQ ID NO: 598, SEQ ID NO: 599, SEQ ID NO: 600, SEQ ID NO: 601, SEQ ID NO: 602, SEQ ID NO: 603, SEQ ID NO: 604, SEQ ID NO: 605, SEQ ID NO: 606, SEQ ID NO: 607, SEQ ID NO: 608, SEQ ID NO: 609, SEQ ID NO: 610, SEQ ID NO: 611, SEQ ID NO: 612, SEQ ID NO: 613, SEQ ID NO: 614, SEQ ID NO: 615, SEQ ID NO: 616, SEQ ID NO: 617, SEQ ID NO: 618, SEQ ID NO: 619, SEQ ID NO: 620, SEQ ID NO: 621, SEQ ID NO: 622, SEQ ID NO: 623, SEQ ID NO: 624, SEQ ID NO: 625, SEQ ID NO: 626, SEQ ID NO: 627, SEQ ID NO: 628, SEQ ID NO: 629, SEQ ID NO: 630, SEQ ID NO: 631, SEQ ID NO: 632, SEQ ID NO: 633, SEQ ID NO: 634, SEQ ID NO: 635, SEQ ID NO: 636, SEQ ID NO: 637, SEQ ID NO: 638, SEQ ID NO: 639, SEQ ID NO: 640, SEQ ID NO: 641, SEQ ID NO: 642, SEQ ID NO: 643, SEQ ID NO: 644, SEQ ID NO: 645, SEQ ID NO: 646, SEQ ID NO: 647, SEQ ID NO: 648, SEQ ID NO: 649, SEQ ID NO: 650, SEQ ID NO: 651, SEQ ID NO: 652, SEQ ID NO: 653, SEQ ID NO: 654, SEQ ID NO: 655, SEQ ID NO: 656, SEQ ID NO: 657, SEQ ID NO: 658, SEQ ID NO: 659, SEQ ID NO: 660, SEQ ID NO: 661, SEQ ID NO: 662, SEQ ID NO: 663, SEQ ID NO: 664, SEQ ID NO: 665, SEQ ID NO: 666, SEQ ID NO: 667, SEQ ID NO: 668, SEQ ID NO: 669, SEQ ID NO: 670, SEQ ID NO: 671, SEQ ID NO: 672, SEQ ID NO: 673, SEQ ID NO: 674, SEQ ID NO: 675, SEQ ID NO: 676, SEQ ID NO: 677, SEQ ID NO: 678, SEQ ID NO: 679, SEQ ID NO: 680, SEQ ID NO: 681, SEQ ID NO: 682, SEQ ID NO: 683, SEQ ID NO: 684, SEQ ID NO: 685, SEQ ID NO: 686, SEQ ID NO: 687, SEQ ID NO: 688, SEQ ID NO: 689, SEQ ID NO: 690, SEQ ID NO: 691, SEQ ID NO: 692, SEQ ID NO: 693, SEQ ID NO: 694, SEQ ID NO: 695, or SEQ ID NO: 696.

[0686] In some examples of any of the ABPCs described herein, the first antigen-binding domain includes a light chain variable domain comprising SEQ ID NO: 724, and a heavy chain variable domain comprising: SEQ ID NO: 502, SEQ ID NO: 510, SEQ ID NO: 511, SEQ ID NO: 512, SEQ ID NO: 513, SEQ ID NO: 514, SEQ ID NO: 515, SEQ ID NO: 516, SEQ ID NO: 517, SEQ ID NO: 518, SEQ ID NO: 519, SEQ ID NO: 520, SEQ ID NO: 521, SEQ ID NO: 522, SEQ ID NO: 523, SEQ ID NO: 524, SEQ ID NO: 525, SEQ ID NO: 526, SEQ ID NO: 527, SEQ ID NO: 528, SEQ ID NO: 529, SEQ ID NO: 530, SEQ ID NO: 531, SEQ ID NO: 532, SEQ ID NO: 533, SEQ ID NO: 534, SEQ ID NO: 535, SEQ ID NO: 536, SEQ ID NO: 537, SEQ ID NO: 538, SEQ ID NO: 539, SEQ ID NO: 540, SEQ ID NO: 541, SEQ ID NO: 542, SEQ ID NO: 543, SEQ ID NO: 544, SEQ ID NO: 545, SEQ ID NO: 546, SEQ ID NO: 547, SEQ ID NO: 548, SEQ ID NO: 577, SEQ ID NO: 578, SEQ ID NO: 579, SEQ ID NO: 580, SEQ ID NO: 581, SEQ ID NO: 582, SEQ ID NO: 583, SEQ ID NO: 584, SEQ ID NO: 585, SEQ ID NO: 586, SEQ ID NO: 587, SEQ ID NO: 588, SEQ ID NO: 589, SEQ ID NO: 590, SEQ ID NO: 591, SEQ ID NO: 592, SEQ ID NO: 593, SEQ ID NO: 594, SEQ ID NO: 595, SEQ ID NO: 596, SEQ ID NO: 597, SEQ ID NO: 598, SEQ ID NO: 599, SEQ ID NO: 600, SEQ ID NO: 601, SEQ ID NO: 602, SEQ ID NO: 603, SEQ ID NO: 604, SEQ ID NO: 605, SEQ ID NO: 606, SEQ ID NO: 607, SEQ ID NO: 608, SEQ ID NO: 609, SEQ ID NO: 610, SEQ ID NO: 611, SEQ ID NO: 612, SEQ ID NO: 613, SEQ ID NO: 614, SEQ ID NO: 615, SEQ ID NO: 616, SEQ ID NO: 617, SEQ ID NO: 618, SEQ ID NO: 619, SEQ ID NO: 620, SEQ ID NO: 621, SEQ ID NO: 622, SEQ ID NO: 623, SEQ ID NO: 624, SEQ ID NO: 625, SEQ ID NO: 626, SEQ ID NO: 627, SEQ ID NO: 628, SEQ ID NO: 629, SEQ ID NO: 630, SEQ ID NO: 631, SEQ ID NO: 632, SEQ ID NO: 633, SEQ ID NO: 634, SEQ ID NO: 635, SEQ ID NO: 636, SEQ ID NO: 637, SEQ ID NO: 638, SEQ ID NO: 639, SEQ ID NO: 640, SEQ ID NO: 641, SEQ ID NO: 642, SEQ ID NO: 643, SEQ ID NO: 644, SEQ ID NO: 645, SEQ ID NO: 646, SEQ ID NO: 647, SEQ ID NO: 648, SEQ ID NO: 649, SEQ ID NO: 650, SEQ ID NO: 651, SEQ ID NO: 652, SEQ ID NO: 653, SEQ ID NO: 654, SEQ ID NO: 655, SEQ ID NO: 656, SEQ ID NO: 657, SEQ ID NO: 658, SEQ ID NO: 659, SEQ ID NO: 660, SEQ ID NO: 661, SEQ ID NO: 662, SEQ ID NO: 663, SEQ ID NO: 664, SEQ ID NO: 665, SEQ ID NO: 666, SEQ ID NO: 667, SEQ ID NO: 668, SEQ ID NO: 669, SEQ ID NO: 670, SEQ ID NO: 671, SEQ ID NO: 672, SEQ ID NO: 673, SEQ ID NO: 674, SEQ ID NO: 675, SEQ ID NO: 676, SEQ ID NO: 677, SEQ ID NO: 678, SEQ ID NO: 679, SEQ ID NO: 680, SEQ ID NO: 681, SEQ ID NO: 682, SEQ ID NO: 683, SEQ ID NO: 684, SEQ ID NO: 685, SEQ ID NO: 686, SEQ ID NO: 687, SEQ ID NO: 688, SEQ ID NO: 689, SEQ ID NO: 690, SEQ ID NO: 691, SEQ ID NO: 692, SEQ ID NO: 693, SEQ ID NO: 694, SEQ ID NO: 695, or SEQ ID NO: 696.

[0687] In some examples of any of the ABPCs described herein, the first antigen-binding domain includes a light chain variable domain comprising SEQ ID NO: 725, and a heavy chain variable domain comprising: SEQ ID NO: 502, SEQ ID NO: 510, SEQ ID NO: 511, SEQ ID NO: 512, SEQ ID NO: 513, SEQ ID NO: 514, SEQ ID NO: 515, SEQ ID NO: 516, SEQ ID NO: 517, SEQ ID NO: 518, SEQ ID NO: 519, SEQ ID NO: 520, SEQ ID NO: 521, SEQ ID NO: 522, SEQ ID NO: 523, SEQ ID NO: 524, SEQ ID NO: 525, SEQ ID NO: 526, SEQ ID NO: 527, SEQ ID NO: 528, SEQ ID NO: 529, SEQ ID NO: 530, SEQ ID NO: 531, SEQ ID NO: 532, SEQ ID NO: 533, SEQ ID NO: 534, SEQ ID NO: 535, SEQ ID NO: 536, SEQ ID NO: 537, SEQ ID NO: 538, SEQ ID NO: 539, SEQ ID NO: 540, SEQ ID NO: 541, SEQ ID NO: 542, SEQ ID NO: 543, SEQ ID NO: 544, SEQ ID NO: 545, SEQ ID NO: 546, SEQ ID NO: 547, SEQ ID NO: 548, SEQ ID NO: 577, SEQ ID NO: 578, SEQ ID NO: 579, SEQ ID NO: 580, SEQ ID NO: 581, SEQ ID NO: 582, SEQ ID NO: 583, SEQ ID NO: 584, SEQ ID NO: 585, SEQ ID NO: 586, SEQ ID NO: 587, SEQ ID NO: 588, SEQ ID NO: 589, SEQ ID NO: 590, SEQ ID NO: 591, SEQ ID NO: 592, SEQ ID NO: 593, SEQ ID NO: 594, SEQ ID NO: 595, SEQ ID NO: 596, SEQ ID NO: 597, SEQ ID NO: 598, SEQ ID NO: 599, SEQ ID NO: 600, SEQ ID NO: 601, SEQ ID NO: 602, SEQ ID NO: 603, SEQ ID NO: 604, SEQ ID NO: 605, SEQ ID NO: 606, SEQ ID NO: 607, SEQ ID NO: 608, SEQ ID NO: 609, SEQ ID NO: 610, SEQ ID NO: 611, SEQ ID NO: 612, SEQ ID NO: 613, SEQ ID NO: 614, SEQ ID NO: 615, SEQ ID NO: 616, SEQ ID NO: 617, SEQ ID NO: 618, SEQ ID NO: 619, SEQ ID NO: 620, SEQ ID NO: 621, SEQ ID NO: 622, SEQ ID NO: 623, SEQ ID NO: 624, SEQ ID NO: 625, SEQ ID NO: 626, SEQ ID NO: 627, SEQ ID NO: 628, SEQ ID NO: 629, SEQ ID NO: 630, SEQ ID NO: 631, SEQ ID NO: 632, SEQ ID NO: 633, SEQ ID NO: 634, SEQ ID NO: 635, SEQ ID NO: 636, SEQ ID NO: 637, SEQ ID NO: 638, SEQ ID NO: 639, SEQ ID NO: 640, SEQ ID NO: 641, SEQ ID NO: 642, SEQ ID NO: 643, SEQ ID NO: 644, SEQ ID NO: 645, SEQ ID NO: 646, SEQ ID NO: 647, SEQ ID NO: 648, SEQ ID NO: 649, SEQ ID NO: 650, SEQ ID NO: 651, SEQ ID NO: 652, SEQ ID NO: 653, SEQ ID NO: 654, SEQ ID NO: 655, SEQ ID NO: 656, SEQ ID NO: 657, SEQ ID NO: 658, SEQ ID NO: 659, SEQ ID NO: 660, SEQ ID NO: 661, SEQ ID NO: 662, SEQ ID NO: 663, SEQ ID NO: 664, SEQ ID NO: 665, SEQ ID NO: 666, SEQ ID NO: 667, SEQ ID NO: 668, SEQ ID NO: 669, SEQ ID NO: 670, SEQ ID NO: 671, SEQ ID NO: 672, SEQ ID NO: 673, SEQ ID NO: 674, SEQ ID NO: 675, SEQ ID NO: 676, SEQ ID NO: 677, SEQ ID NO: 678, SEQ ID NO: 679, SEQ ID NO: 680, SEQ ID NO: 681, SEQ ID NO: 682, SEQ ID NO: 683, SEQ ID NO: 684, SEQ ID NO: 685, SEQ ID NO: 686, SEQ ID NO: 687, SEQ ID NO: 688, SEQ ID NO: 689, SEQ ID NO: 690, SEQ ID NO: 691, SEQ ID NO: 692, SEQ ID NO: 693, SEQ ID NO: 694, SEQ ID NO: 695, or SEQ ID NO: 696.

[0688] In some examples of any of the ABPCs described herein, the first antigen-binding domain includes a light chain variable domain comprising SEQ ID NO: 726, and a heavy chain variable domain comprising: SEQ ID NO: 502, SEQ ID NO: 510, SEQ ID NO: 511, SEQ ID NO: 512, SEQ ID NO: 513, SEQ ID NO: 514, SEQ ID NO: 515, SEQ ID NO: 516, SEQ ID NO: 517, SEQ ID NO: 518, SEQ ID NO: 519, SEQ ID NO: 520, SEQ ID NO: 521, SEQ ID NO: 522, SEQ ID NO: 523, SEQ ID NO: 524, SEQ ID NO: 525, SEQ ID NO: 526, SEQ ID NO: 527, SEQ ID NO: 528, SEQ ID NO: 529, SEQ ID NO: 530, SEQ ID NO: 531, SEQ ID NO: 532, SEQ ID NO: 533, SEQ ID NO: 534, SEQ ID NO: 535, SEQ ID NO: 536, SEQ ID NO: 537, SEQ ID NO: 538, SEQ ID NO: 539, SEQ ID NO: 540, SEQ ID NO: 541, SEQ ID NO: 542, SEQ ID NO: 543, SEQ ID NO: 544, SEQ ID NO: 545, SEQ ID NO: 546, SEQ ID NO: 547, SEQ ID NO: 548, SEQ ID NO: 577, SEQ ID NO: 578, SEQ ID NO: 579, SEQ ID NO: 580, SEQ ID NO: 581, SEQ ID NO: 582, SEQ ID NO: 583, SEQ ID NO: 584, SEQ ID NO: 585, SEQ ID NO: 586, SEQ ID NO: 587, SEQ ID NO: 588, SEQ ID NO: 589, SEQ ID NO: 590, SEQ ID NO: 591, SEQ ID NO: 592, SEQ ID NO: 593, SEQ ID NO: 594, SEQ ID NO: 595, SEQ ID NO: 596, SEQ ID NO: 597, SEQ ID NO: 598, SEQ ID NO: 599, SEQ ID NO: 600, SEQ ID NO: 601, SEQ ID NO: 602, SEQ ID NO: 603, SEQ ID NO: 604, SEQ ID NO: 605, SEQ ID NO: 606, SEQ ID NO: 607, SEQ ID NO: 608, SEQ ID NO: 609, SEQ ID NO: 610, SEQ ID NO: 611, SEQ ID NO: 612, SEQ ID NO: 613, SEQ ID NO: 614, SEQ ID NO: 615, SEQ ID NO: 616, SEQ ID NO: 617, SEQ ID NO: 618, SEQ ID NO: 619, SEQ ID NO: 620, SEQ ID NO: 621, SEQ ID NO: 622, SEQ ID NO: 623, SEQ ID NO: 624, SEQ ID NO: 625, SEQ ID NO: 626, SEQ ID NO: 627, SEQ ID NO: 628, SEQ ID NO: 629, SEQ ID NO: 630, SEQ ID NO: 631, SEQ ID NO: 632, SEQ ID NO: 633, SEQ ID NO: 634, SEQ ID NO: 635, SEQ ID NO: 636, SEQ ID NO: 637, SEQ ID NO: 638, SEQ ID NO: 639, SEQ ID NO: 640, SEQ ID NO: 641, SEQ ID NO: 642, SEQ ID NO: 643, SEQ ID NO: 644, SEQ ID NO: 645, SEQ ID NO: 646, SEQ ID NO: 647, SEQ ID NO: 648, SEQ ID NO: 649, SEQ ID NO: 650, SEQ ID NO: 651, SEQ ID NO: 652, SEQ ID NO: 653, SEQ ID NO: 654, SEQ ID NO: 655, SEQ ID NO: 656, SEQ ID NO: 657, SEQ ID NO: 658, SEQ ID NO: 659, SEQ ID NO: 660, SEQ ID NO: 661, SEQ ID NO: 662, SEQ ID NO: 663, SEQ ID NO: 664, SEQ ID NO: 665, SEQ ID NO: 666, SEQ ID NO: 667, SEQ ID NO: 668, SEQ ID NO: 669, SEQ ID NO: 670, SEQ ID NO: 671, SEQ ID NO: 672, SEQ ID NO: 673, SEQ ID NO: 674, SEQ ID NO: 675, SEQ ID NO: 676, SEQ ID NO: 677, SEQ ID NO: 678, SEQ ID NO: 679, SEQ ID NO: 680, SEQ ID NO: 681, SEQ ID NO: 682, SEQ ID NO: 683, SEQ ID NO: 684, SEQ ID NO: 685, SEQ ID NO: 686, SEQ ID NO: 687, SEQ ID NO: 688, SEQ ID NO: 689, SEQ ID NO: 690, SEQ ID NO: 691, SEQ ID NO: 692, SEQ ID NO: 693, SEQ ID NO: 694, SEQ ID NO: 695, or SEQ ID NO: 696.

[0689] In some examples of any of the ABPCs described herein, the first antigen-binding domain includes a light chain variable domain comprising SEQ ID NO: 727, and a heavy chain variable domain comprising: SEQ ID NO: 502, SEQ ID NO: 510, SEQ ID NO: 511, SEQ ID NO: 512, SEQ ID NO: 513, SEQ ID NO: 514, SEQ ID NO: 515, SEQ ID NO: 516, SEQ ID NO: 517, SEQ ID NO: 518, SEQ ID NO: 519, SEQ ID NO: 520, SEQ ID NO: 521, SEQ ID NO: 522, SEQ ID NO: 523, SEQ ID NO: 524, SEQ ID NO: 525, SEQ ID NO: 526, SEQ ID NO: 527, SEQ ID NO: 528, SEQ ID NO: 529, SEQ ID NO: 530, SEQ ID NO: 531, SEQ ID NO: 532, SEQ ID NO: 533, SEQ ID NO: 534, SEQ ID NO: 535, SEQ ID NO: 536, SEQ ID NO: 537, SEQ ID NO: 538, SEQ ID NO: 539, SEQ ID NO: 540, SEQ ID NO: 541, SEQ ID NO: 542, SEQ ID NO: 543, SEQ ID NO: 544, SEQ ID NO: 545, SEQ ID NO: 546, SEQ ID NO: 547, SEQ ID NO: 548, SEQ ID NO: 577, SEQ ID NO: 578, SEQ ID NO: 579, SEQ ID NO: 580, SEQ ID NO: 581, SEQ ID NO: 582, SEQ ID NO: 583, SEQ ID NO: 584, SEQ ID NO: 585, SEQ ID NO: 586, SEQ ID NO: 587, SEQ ID NO: 588, SEQ ID NO: 589, SEQ ID NO: 590, SEQ ID NO: 591, SEQ ID NO: 592, SEQ ID NO: 593, SEQ ID NO: 594, SEQ ID NO: 595, SEQ ID NO: 596, SEQ ID NO: 597, SEQ ID NO: 598, SEQ ID NO: 599, SEQ ID NO: 600, SEQ ID NO: 601, SEQ ID NO: 602, SEQ ID NO: 603, SEQ ID NO: 604, SEQ ID NO: 605, SEQ ID NO: 606, SEQ ID NO: 607, SEQ ID NO: 608, SEQ ID NO: 609, SEQ ID NO: 610, SEQ ID NO: 611, SEQ ID NO: 612, SEQ ID NO: 613, SEQ ID NO: 614, SEQ ID NO: 615, SEQ ID NO: 616, SEQ ID NO: 617, SEQ ID NO: 618, SEQ ID NO: 619, SEQ ID NO: 620, SEQ ID NO: 621, SEQ ID NO: 622, SEQ ID NO: 623, SEQ ID NO: 624, SEQ ID NO: 625, SEQ ID NO: 626, SEQ ID NO: 627, SEQ ID NO: 628, SEQ ID NO: 629, SEQ ID NO: 630, SEQ ID NO: 631, SEQ ID NO: 632, SEQ ID NO: 633, SEQ ID NO: 634, SEQ ID NO: 635, SEQ ID NO: 636, SEQ ID NO: 637, SEQ ID NO: 638, SEQ ID NO: 639, SEQ ID NO: 640, SEQ ID NO: 641, SEQ ID NO: 642, SEQ ID NO: 643, SEQ ID NO: 644, SEQ ID NO: 645, SEQ ID NO: 646, SEQ ID NO: 647, SEQ ID NO: 648, SEQ ID NO: 649, SEQ ID NO: 650, SEQ ID NO: 651, SEQ ID NO: 652, SEQ ID NO: 653, SEQ ID NO: 654, SEQ ID NO: 655, SEQ ID NO: 656, SEQ ID NO: 657, SEQ ID NO: 658, SEQ ID NO: 659, SEQ ID NO: 660, SEQ ID NO: 661, SEQ ID NO: 662, SEQ ID NO: 663, SEQ ID NO: 664, SEQ ID NO: 665, SEQ ID NO: 666, SEQ ID NO: 667, SEQ ID NO: 668, SEQ ID NO: 669, SEQ ID NO: 670, SEQ ID NO: 671, SEQ ID NO: 672, SEQ ID NO: 673, SEQ ID NO: 674, SEQ ID NO: 675, SEQ ID NO: 676, SEQ ID NO: 677, SEQ ID NO: 678, SEQ ID NO: 679, SEQ ID NO: 680, SEQ ID NO: 681, SEQ ID NO: 682, SEQ ID NO: 683, SEQ ID NO: 684, SEQ ID NO: 685, SEQ ID NO: 686, SEQ ID NO: 687, SEQ ID NO: 688, SEQ ID NO: 689, SEQ ID NO: 690, SEQ ID NO: 691, SEQ ID NO: 692, SEQ ID NO: 693, SEQ ID NO: 694, SEQ ID NO: 695, or SEQ ID NO: 696.

[0690] In some examples of any of the ABPCs described herein, the first antigen-binding domain includes a light chain variable domain comprising SEQ ID NO: 728, and a heavy chain variable domain comprising: SEQ ID NO: 502, SEQ ID NO: 510, SEQ ID NO: 511, SEQ ID NO: 512, SEQ ID NO: 513, SEQ ID NO: 514, SEQ ID NO: 515, SEQ ID NO: 516, SEQ ID NO: 517, SEQ ID NO: 518, SEQ ID NO: 519, SEQ ID NO: 520, SEQ ID NO: 521, SEQ ID NO: 522, SEQ ID NO: 523, SEQ ID NO: 524, SEQ ID NO: 525, SEQ ID NO: 526, SEQ ID NO: 527, SEQ ID NO: 528, SEQ ID NO: 529, SEQ ID NO: 530, SEQ ID NO: 531, SEQ ID NO: 532, SEQ ID NO: 533, SEQ ID NO: 534, SEQ ID NO: 535, SEQ ID NO: 536, SEQ ID NO: 537, SEQ ID NO: 538, SEQ ID NO: 539, SEQ ID NO: 540, SEQ ID NO: 541, SEQ ID NO: 542, SEQ ID NO: 543, SEQ ID NO: 544, SEQ ID NO: 545, SEQ ID NO: 546, SEQ ID NO: 547, SEQ ID NO: 548, SEQ ID NO: 577, SEQ ID NO: 578, SEQ ID NO: 579, SEQ ID NO: 580, SEQ ID NO: 581, SEQ ID NO: 582, SEQ ID NO: 583, SEQ ID NO: 584, SEQ ID NO: 585, SEQ ID NO: 586, SEQ ID NO: 587, SEQ ID NO: 588, SEQ ID NO: 589, SEQ ID NO: 590, SEQ ID NO: 591, SEQ ID NO: 592, SEQ ID NO: 593, SEQ ID NO: 594, SEQ ID NO: 595, SEQ ID NO: 596, SEQ ID NO: 597, SEQ ID NO: 598, SEQ ID NO: 599, SEQ ID NO: 600, SEQ ID NO: 601, SEQ ID NO: 602, SEQ ID NO: 603, SEQ ID NO: 604, SEQ ID NO: 605, SEQ ID NO: 606, SEQ ID NO: 607, SEQ ID NO: 608, SEQ ID NO: 609, SEQ ID NO: 610, SEQ ID NO: 611, SEQ ID NO: 612, SEQ ID NO: 613, SEQ ID NO: 614, SEQ ID NO: 615, SEQ ID NO: 616, SEQ ID NO: 617, SEQ ID NO: 618, SEQ ID NO: 619, SEQ ID NO: 620, SEQ ID NO: 621, SEQ ID NO: 622, SEQ ID NO: 623, SEQ ID NO: 624, SEQ ID NO: 625, SEQ ID NO: 626, SEQ ID NO: 627, SEQ ID NO: 628, SEQ ID NO: 629, SEQ ID NO: 630, SEQ ID NO: 631, SEQ ID NO: 632, SEQ ID NO: 633, SEQ ID NO: 634, SEQ ID NO: 635, SEQ ID NO: 636, SEQ ID NO: 637, SEQ ID NO: 638, SEQ ID NO: 639, SEQ ID NO: 640, SEQ ID NO: 641, SEQ ID NO: 642, SEQ ID NO: 643, SEQ ID NO: 644, SEQ ID NO: 645, SEQ ID NO: 646, SEQ ID NO: 647, SEQ ID NO: 648, SEQ ID NO: 649, SEQ ID NO: 650, SEQ ID NO: 651, SEQ ID NO: 652, SEQ ID NO: 653, SEQ ID NO: 654, SEQ ID NO: 655, SEQ ID NO: 656, SEQ ID NO: 657, SEQ ID NO: 658, SEQ ID NO: 659, SEQ ID NO: 660, SEQ ID NO: 661, SEQ ID NO: 662, SEQ ID NO: 663, SEQ ID NO: 664, SEQ ID NO: 665, SEQ ID NO: 666, SEQ ID NO: 667, SEQ ID NO: 668, SEQ ID NO: 669, SEQ ID NO: 670, SEQ ID NO: 671, SEQ ID NO: 672, SEQ ID NO: 673, SEQ ID NO: 674, SEQ ID NO: 675, SEQ ID NO: 676, SEQ ID NO: 677, SEQ ID NO: 678, SEQ ID NO: 679, SEQ ID NO: 680, SEQ ID NO: 681, SEQ ID NO: 682, SEQ ID NO: 683, SEQ ID NO: 684, SEQ ID NO: 685, SEQ ID NO: 686, SEQ ID NO: 687, SEQ ID NO: 688, SEQ ID NO: 689, SEQ ID NO: 690, SEQ ID NO: 691, SEQ ID NO: 692, SEQ ID NO: 693, SEQ ID NO: 694, SEQ ID NO: 695, or SEQ ID NO: 696.

[0691] In some examples of any of the ABPCs described herein, the first antigen-binding domain includes a light chain variable domain comprising SEQ ID NO: 729, and a heavy chain variable domain comprising: SEQ ID NO: 502, SEQ ID NO: 510, SEQ ID NO: 511, SEQ ID NO: 512, SEQ ID NO: 513, SEQ ID NO: 514, SEQ ID NO: 515, SEQ ID NO: 516, SEQ ID NO: 517, SEQ ID NO: 518, SEQ ID NO: 519, SEQ ID NO: 520, SEQ ID NO: 521, SEQ ID NO: 522, SEQ ID NO: 523, SEQ ID NO: 524, SEQ ID NO: 525, SEQ ID NO: 526, SEQ ID NO: 527, SEQ ID NO: 528, SEQ ID NO: 529, SEQ ID NO: 530, SEQ ID NO: 531, SEQ ID NO: 532, SEQ ID NO: 533, SEQ ID NO: 534, SEQ ID NO: 535, SEQ ID NO: 536, SEQ ID NO: 537, SEQ ID NO: 538, SEQ ID NO: 539, SEQ ID NO: 540, SEQ ID NO: 541, SEQ ID NO: 542, SEQ ID NO: 543, SEQ ID NO: 544, SEQ ID NO: 545, SEQ ID NO: 546, SEQ ID NO: 547, SEQ ID NO: 548, SEQ ID NO: 577, SEQ ID NO: 578, SEQ ID NO: 579, SEQ ID NO: 580, SEQ ID NO: 581, SEQ ID NO: 582, SEQ ID NO: 583, SEQ ID NO: 584, SEQ ID NO: 585, SEQ ID NO: 586, SEQ ID NO: 587, SEQ ID NO: 588, SEQ ID NO: 589, SEQ ID NO: 590, SEQ ID NO: 591, SEQ ID NO: 592, SEQ ID NO: 593, SEQ ID NO: 594, SEQ ID NO: 595, SEQ ID NO: 596, SEQ ID NO: 597, SEQ ID NO: 598, SEQ ID NO: 599, SEQ ID NO: 600, SEQ ID NO: 601, SEQ ID NO: 602, SEQ ID NO: 603, SEQ ID NO: 604, SEQ ID NO: 605, SEQ ID NO: 606, SEQ ID NO: 607, SEQ ID NO: 608, SEQ ID NO: 609, SEQ ID NO: 610, SEQ ID NO: 611, SEQ ID NO: 612, SEQ ID NO: 613, SEQ ID NO: 614, SEQ ID NO: 615, SEQ ID NO: 616, SEQ ID NO: 617, SEQ ID NO: 618, SEQ ID NO: 619, SEQ ID NO: 620, SEQ ID NO: 621, SEQ ID NO: 622, SEQ ID NO: 623, SEQ ID NO: 624, SEQ ID NO: 625, SEQ ID NO: 626, SEQ ID NO: 627, SEQ ID NO: 628, SEQ ID NO: 629, SEQ ID NO: 630, SEQ ID NO: 631, SEQ ID NO: 632, SEQ ID NO: 633, SEQ ID NO: 634, SEQ ID NO: 635, SEQ ID NO: 636, SEQ ID NO: 637, SEQ ID NO: 638, SEQ ID NO: 639, SEQ ID NO: 640, SEQ ID NO: 641, SEQ ID NO: 642, SEQ ID NO: 643, SEQ ID NO: 644, SEQ ID NO: 645, SEQ ID NO: 646, SEQ ID NO: 647, SEQ ID NO: 648, SEQ ID NO: 649, SEQ ID NO: 650, SEQ ID NO: 651, SEQ ID NO: 652, SEQ ID NO: 653, SEQ ID NO: 654, SEQ ID NO: 655, SEQ ID NO: 656, SEQ ID NO: 657, SEQ ID NO: 658, SEQ ID NO: 659, SEQ ID NO: 660, SEQ ID NO: 661, SEQ ID NO: 662, SEQ ID NO: 663, SEQ ID NO: 664, SEQ ID NO: 665, SEQ ID NO: 666, SEQ ID NO: 667, SEQ ID NO: 668, SEQ ID NO: 669, SEQ ID NO: 670, SEQ ID NO: 671, SEQ ID NO: 672, SEQ ID NO: 673, SEQ ID NO: 674, SEQ ID NO: 675, SEQ ID NO: 676, SEQ ID NO: 677, SEQ ID NO: 678, SEQ ID NO: 679, SEQ ID NO: 680, SEQ ID NO: 681, SEQ ID NO: 682, SEQ ID NO: 683, SEQ ID NO: 684, SEQ ID NO: 685, SEQ ID NO: 686, SEQ ID NO: 687, SEQ ID NO: 688, SEQ ID NO: 689, SEQ ID NO: 690, SEQ ID NO: 691, SEQ ID NO: 692, SEQ ID NO: 693, SEQ ID NO: 694, SEQ ID NO: 695, or SEQ ID NO: 696.

[0692] In some examples of any of the ABPCs described herein, the first antigen-binding domain includes a light chain variable domain comprising SEQ ID NO: 730, and a heavy chain variable domain comprising: SEQ ID NO: 502, SEQ ID NO: 510, SEQ ID NO: 511, SEQ ID NO: 512, SEQ ID NO: 513, SEQ ID NO: 514, SEQ ID NO: 515, SEQ ID NO: 516, SEQ ID NO: 517, SEQ ID NO: 518, SEQ ID NO: 519, SEQ ID NO: 520, SEQ ID NO: 521, SEQ ID NO: 522, SEQ ID NO: 523, SEQ ID NO: 524, SEQ ID NO: 525, SEQ ID NO: 526, SEQ ID NO: 527, SEQ ID NO: 528, SEQ ID NO: 529, SEQ ID NO: 530, SEQ ID NO: 531, SEQ ID NO: 532, SEQ ID NO: 533, SEQ ID NO: 534, SEQ ID NO: 535, SEQ ID NO: 536, SEQ ID NO: 537, SEQ ID NO: 538, SEQ ID NO: 539, SEQ ID NO: 540, SEQ ID NO: 541, SEQ ID NO: 542, SEQ ID NO: 543, SEQ ID NO: 544, SEQ ID NO: 545, SEQ ID NO: 546, SEQ ID NO: 547, SEQ ID NO: 548, SEQ ID NO: 577, SEQ ID NO: 578, SEQ ID NO: 579, SEQ ID NO: 580, SEQ ID NO: 581, SEQ ID NO: 582, SEQ ID NO: 583, SEQ ID NO: 584, SEQ ID NO: 585, SEQ ID NO: 586, SEQ ID NO: 587, SEQ ID NO: 588, SEQ ID NO: 589, SEQ ID NO: 590, SEQ ID NO: 591, SEQ ID NO: 592, SEQ ID NO: 593, SEQ ID NO: 594, SEQ ID NO: 595, SEQ ID NO: 596, SEQ ID NO: 597, SEQ ID NO: 598, SEQ ID NO: 599, SEQ ID NO: 600, SEQ ID NO: 601, SEQ ID NO: 602, SEQ ID NO: 603, SEQ ID NO: 604, SEQ ID NO: 605, SEQ ID NO: 606, SEQ ID NO: 607, SEQ ID NO: 608, SEQ ID NO: 609, SEQ ID NO: 610, SEQ ID NO: 611, SEQ ID NO: 612, SEQ ID NO: 613, SEQ ID NO: 614, SEQ ID NO: 615, SEQ ID NO: 616, SEQ ID NO: 617, SEQ ID NO: 618, SEQ ID NO: 619, SEQ ID NO: 620, SEQ ID NO: 621, SEQ ID NO: 622, SEQ ID NO: 623, SEQ ID NO: 624, SEQ ID NO: 625, SEQ ID NO: 626, SEQ ID NO: 627, SEQ ID NO: 628, SEQ ID NO: 629, SEQ ID NO: 630, SEQ ID NO: 631, SEQ ID NO: 632, SEQ ID NO: 633, SEQ ID NO: 634, SEQ ID NO: 635, SEQ ID NO: 636, SEQ ID NO: 637, SEQ ID NO: 638, SEQ ID NO: 639, SEQ ID NO: 640, SEQ ID NO: 641, SEQ ID NO: 642, SEQ ID NO: 643, SEQ ID NO: 644, SEQ ID NO: 645, SEQ ID NO: 646, SEQ ID NO: 647, SEQ ID NO: 648, SEQ ID NO: 649, SEQ ID NO: 650, SEQ ID NO: 651, SEQ ID NO: 652, SEQ ID NO: 653, SEQ ID NO: 654, SEQ ID NO: 655, SEQ ID NO: 656, SEQ ID NO: 657, SEQ ID NO: 658, SEQ ID NO: 659, SEQ ID NO: 660, SEQ ID NO: 661, SEQ ID NO: 662, SEQ ID NO: 663, SEQ ID NO: 664, SEQ ID NO: 665, SEQ ID NO: 666, SEQ ID NO: 667, SEQ ID NO: 668, SEQ ID NO: 669, SEQ ID NO: 670, SEQ ID NO: 671, SEQ ID NO: 672, SEQ ID NO: 673, SEQ ID NO: 674, SEQ ID NO: 675, SEQ ID NO: 676, SEQ ID NO: 677, SEQ ID NO: 678, SEQ ID NO: 679, SEQ ID NO: 680, SEQ ID NO: 681, SEQ ID NO: 682, SEQ ID NO: 683, SEQ ID NO: 684, SEQ ID NO: 685, SEQ ID NO: 686, SEQ ID NO: 687, SEQ ID NO: 688, SEQ ID NO: 689, SEQ ID NO: 690, SEQ ID NO: 691, SEQ ID NO: 692, SEQ ID NO: 693, SEQ ID NO: 694, SEQ ID NO: 695, or SEQ ID NO: 696.

[0693] In some examples of any of the ABPCs described herein, the first antigen-binding domain includes a light chain variable domain comprising SEQ ID NO: 731, and a heavy chain variable domain comprising: SEQ ID NO: 502, SEQ ID NO: 510, SEQ ID NO: 511, SEQ ID NO: 512, SEQ ID NO: 513, SEQ ID NO: 514, SEQ ID NO: 515, SEQ ID NO: 516, SEQ ID NO: 517, SEQ ID NO: 518, SEQ ID NO: 519, SEQ ID NO: 520, SEQ ID NO: 521, SEQ ID NO: 522, SEQ ID NO: 523, SEQ ID NO: 524, SEQ ID NO: 525, SEQ ID NO: 526, SEQ ID NO: 527, SEQ ID NO: 528, SEQ ID NO: 529, SEQ ID NO: 530, SEQ ID NO: 531, SEQ ID NO: 532, SEQ ID NO: 533, SEQ ID NO: 534, SEQ ID NO: 535, SEQ ID NO: 536, SEQ ID NO: 537, SEQ ID NO: 538, SEQ ID NO: 539, SEQ ID NO: 540, SEQ ID NO: 541, SEQ ID NO: 542, SEQ ID NO: 543, SEQ ID NO: 544, SEQ ID NO: 545, SEQ ID NO: 546, SEQ ID NO: 547, SEQ ID NO: 548, SEQ ID NO: 577, SEQ ID NO: 578, SEQ ID NO: 579, SEQ ID NO: 580, SEQ ID NO: 581, SEQ ID NO: 582, SEQ ID NO: 583, SEQ ID NO: 584, SEQ ID NO: 585, SEQ ID NO: 586, SEQ ID NO: 587, SEQ ID NO: 588, SEQ ID NO: 589, SEQ ID NO: 590, SEQ ID NO: 591, SEQ ID NO: 592, SEQ ID NO: 593, SEQ ID NO: 594, SEQ ID NO: 595, SEQ ID NO: 596, SEQ ID NO: 597, SEQ ID NO: 598, SEQ ID NO: 599, SEQ ID NO: 600, SEQ ID NO: 601, SEQ ID NO: 602, SEQ ID NO: 603, SEQ ID NO: 604, SEQ ID NO: 605, SEQ ID NO: 606, SEQ ID NO: 607, SEQ ID NO: 608, SEQ ID NO: 609, SEQ ID NO: 610, SEQ ID NO: 611, SEQ ID NO: 612, SEQ ID NO: 613, SEQ ID NO: 614, SEQ ID NO: 615, SEQ ID NO: 616, SEQ ID NO: 617, SEQ ID NO: 618, SEQ ID NO: 619, SEQ ID NO: 620, SEQ ID NO: 621, SEQ ID NO: 622, SEQ ID NO: 623, SEQ ID NO: 624, SEQ ID NO: 625, SEQ ID NO: 626, SEQ ID NO: 627, SEQ ID NO: 628, SEQ ID NO: 629, SEQ ID NO: 630, SEQ ID NO: 631, SEQ ID NO: 632, SEQ ID NO: 633, SEQ ID NO: 634, SEQ ID NO: 635, SEQ ID NO: 636, SEQ ID NO: 637, SEQ ID NO: 638, SEQ ID NO: 639, SEQ ID NO: 640, SEQ ID NO: 641, SEQ ID NO: 642, SEQ ID NO: 643, SEQ ID NO: 644, SEQ ID NO: 645, SEQ ID NO: 646, SEQ ID NO: 647, SEQ ID NO: 648, SEQ ID NO: 649, SEQ ID NO: 650, SEQ ID NO: 651, SEQ ID NO: 652, SEQ ID NO: 653, SEQ ID NO: 654, SEQ ID NO: 655, SEQ ID NO: 656, SEQ ID NO: 657, SEQ ID NO: 658, SEQ ID NO: 659, SEQ ID NO: 660, SEQ ID NO: 661, SEQ ID NO: 662, SEQ ID NO: 663, SEQ ID NO: 664, SEQ ID NO: 665, SEQ ID NO: 666, SEQ ID NO: 667, SEQ ID NO: 668, SEQ ID NO: 669, SEQ ID NO: 670, SEQ ID NO: 671, SEQ ID NO: 672, SEQ ID NO: 673, SEQ ID NO: 674, SEQ ID NO: 675, SEQ ID NO: 676, SEQ ID NO: 677, SEQ ID NO: 678, SEQ ID NO: 679, SEQ ID NO: 680, SEQ ID NO: 681, SEQ ID NO: 682, SEQ ID NO: 683, SEQ ID NO: 684, SEQ ID NO: 685, SEQ ID NO: 686, SEQ ID NO: 687, SEQ ID NO: 688, SEQ ID NO: 689, SEQ ID NO: 690, SEQ ID NO: 691, SEQ ID NO: 692, SEQ ID NO: 693, SEQ ID NO: 694, SEQ ID NO: 695, or SEQ ID NO: 696.

[0694] In some examples of any of the ABPCs described herein, the first antigen-binding domain includes a light chain variable domain comprising SEQ ID NO: 732, and a heavy chain variable domain comprising: SEQ ID NO: 502, SEQ ID NO: 510, SEQ ID NO: 511, SEQ ID NO: 512, SEQ ID NO: 513, SEQ ID NO: 514, SEQ ID NO: 515, SEQ ID NO: 516, SEQ ID NO: 517, SEQ ID NO: 518, SEQ ID NO: 519, SEQ ID NO: 520, SEQ ID NO: 521, SEQ ID NO: 522, SEQ ID NO: 523, SEQ ID NO: 524, SEQ ID NO: 525, SEQ ID NO: 526, SEQ ID NO: 527, SEQ ID NO: 528, SEQ ID NO: 529, SEQ ID NO: 530, SEQ ID NO: 531, SEQ ID NO: 532, SEQ ID NO: 533, SEQ ID NO: 534, SEQ ID NO: 535, SEQ ID NO: 536, SEQ ID NO: 537, SEQ ID NO: 538, SEQ ID NO: 539, SEQ ID NO: 540, SEQ ID NO: 541, SEQ ID NO: 542, SEQ ID NO: 543, SEQ ID NO: 544, SEQ ID NO: 545, SEQ ID NO: 546, SEQ ID NO: 547, SEQ ID NO: 548, SEQ ID NO: 577, SEQ ID NO: 578, SEQ ID NO: 579, SEQ ID NO: 580, SEQ ID NO: 581, SEQ ID NO: 582, SEQ ID NO: 583, SEQ ID NO: 584, SEQ ID NO: 585, SEQ ID NO: 586, SEQ ID NO: 587, SEQ ID NO: 588, SEQ ID NO: 589, SEQ ID NO: 590, SEQ ID NO: 591, SEQ ID NO: 592, SEQ ID NO: 593, SEQ ID NO: 594, SEQ ID NO: 595, SEQ ID NO: 596, SEQ ID NO: 597, SEQ ID NO: 598, SEQ ID NO: 599, SEQ ID NO: 600, SEQ ID NO: 601, SEQ ID NO: 602, SEQ ID NO: 603, SEQ ID NO: 604, SEQ ID NO: 605, SEQ ID NO: 606, SEQ ID NO: 607, SEQ ID NO: 608, SEQ ID NO: 609, SEQ ID NO: 610, SEQ ID NO: 611, SEQ ID NO: 612, SEQ ID NO: 613, SEQ ID NO: 614, SEQ ID NO: 615, SEQ ID NO: 616, SEQ ID NO: 617, SEQ ID NO: 618, SEQ ID NO: 619, SEQ ID NO: 620, SEQ ID NO: 621, SEQ ID NO: 622, SEQ ID NO: 623, SEQ ID NO: 624, SEQ ID NO: 625, SEQ ID NO: 626, SEQ ID NO: 627, SEQ ID NO: 628, SEQ ID NO: 629, SEQ ID NO: 630, SEQ ID NO: 631, SEQ ID NO: 632, SEQ ID NO: 633, SEQ ID NO: 634, SEQ ID NO: 635, SEQ ID NO: 636, SEQ ID NO: 637, SEQ ID NO: 638, SEQ ID NO: 639, SEQ ID NO: 640, SEQ ID NO: 641, SEQ ID NO: 642, SEQ ID NO: 643, SEQ ID NO: 644, SEQ ID NO: 645, SEQ ID NO: 646, SEQ ID NO: 647, SEQ ID NO: 648, SEQ ID NO: 649, SEQ ID NO: 650, SEQ ID NO: 651, SEQ ID NO: 652, SEQ ID NO: 653, SEQ ID NO: 654, SEQ ID NO: 655, SEQ ID NO: 656, SEQ ID NO: 657, SEQ ID NO: 658, SEQ ID NO: 659, SEQ ID NO: 660, SEQ ID NO: 661, SEQ ID NO: 662, SEQ ID NO: 663, SEQ ID NO: 664, SEQ ID NO: 665, SEQ ID NO: 666, SEQ ID NO: 667, SEQ ID NO: 668, SEQ ID NO: 669, SEQ ID NO: 670, SEQ ID NO: 671, SEQ ID NO: 672, SEQ ID NO: 673, SEQ ID NO: 674, SEQ ID NO: 675, SEQ ID NO: 676, SEQ ID NO: 677, SEQ ID NO: 678, SEQ ID NO: 679, SEQ ID NO: 680, SEQ ID NO: 681, SEQ ID NO: 682, SEQ ID NO: 683, SEQ ID NO: 684, SEQ ID NO: 685, SEQ ID NO: 686, SEQ ID NO: 687, SEQ ID NO: 688, SEQ ID NO: 689, SEQ ID NO: 690, SEQ ID NO: 691, SEQ ID NO: 692, SEQ ID NO: 693, SEQ ID NO: 694, SEQ ID NO: 695, or SEQ ID NO: 696.

[0695] In some examples of any of the ABPCs described herein, the first antigen-binding domain includes a light chain variable domain comprising SEQ ID NO: 733, and a heavy chain variable domain comprising: SEQ ID NO: 502, SEQ ID NO: 510, SEQ ID NO: 511, SEQ ID NO: 512, SEQ ID NO: 513, SEQ ID NO: 514, SEQ ID NO: 515, SEQ ID NO: 516, SEQ ID NO: 517, SEQ ID NO: 518, SEQ ID NO: 519, SEQ ID NO: 520, SEQ ID NO: 521, SEQ ID NO: 522, SEQ ID NO: 523, SEQ ID NO: 524, SEQ ID NO: 525, SEQ ID NO: 526, SEQ ID NO: 527, SEQ ID NO: 528, SEQ ID NO: 529, SEQ ID NO: 530, SEQ ID NO: 531, SEQ ID NO: 532, SEQ ID NO: 533, SEQ ID NO: 534, SEQ ID NO: 535, SEQ ID NO: 536, SEQ ID NO: 537, SEQ ID NO: 538, SEQ ID NO: 539, SEQ ID NO: 540, SEQ ID NO: 541, SEQ ID NO: 542, SEQ ID NO: 543, SEQ ID NO: 544, SEQ ID NO: 545, SEQ ID NO: 546, SEQ ID NO: 547, SEQ ID NO: 548, SEQ ID NO: 577, SEQ ID NO: 578, SEQ ID NO: 579, SEQ ID NO: 580, SEQ ID NO: 581, SEQ ID NO: 582, SEQ ID NO: 583, SEQ ID NO: 584, SEQ ID NO: 585, SEQ ID NO: 586, SEQ ID NO: 587, SEQ ID NO: 588, SEQ ID NO: 589, SEQ ID NO: 590, SEQ ID NO: 591, SEQ ID NO: 592, SEQ ID NO: 593, SEQ ID NO: 594, SEQ ID NO: 595, SEQ ID NO: 596, SEQ ID NO: 597, SEQ ID NO: 598, SEQ ID NO: 599, SEQ ID NO: 600, SEQ ID NO: 601, SEQ ID NO: 602, SEQ ID NO: 603, SEQ ID NO: 604, SEQ ID NO: 605, SEQ ID NO: 606, SEQ ID NO: 607, SEQ ID NO: 608, SEQ ID NO: 609, SEQ ID NO: 610, SEQ ID NO: 611, SEQ ID NO: 612, SEQ ID NO: 613, SEQ ID NO: 614, SEQ ID NO: 615, SEQ ID NO: 616, SEQ ID NO: 617, SEQ ID NO: 618, SEQ ID NO: 619, SEQ ID NO: 620, SEQ ID NO: 621, SEQ ID NO: 622, SEQ ID NO: 623, SEQ ID NO: 624, SEQ ID NO: 625, SEQ ID NO: 626, SEQ ID NO: 627, SEQ ID NO: 628, SEQ ID NO: 629, SEQ ID NO: 630, SEQ ID NO: 631, SEQ ID NO: 632, SEQ ID NO: 633, SEQ ID NO: 634, SEQ ID NO: 635, SEQ ID NO: 636, SEQ ID NO: 637, SEQ ID NO: 638, SEQ ID NO: 639, SEQ ID NO: 640, SEQ ID NO: 641, SEQ ID NO: 642, SEQ ID NO: 643, SEQ ID NO: 644, SEQ ID NO: 645, SEQ ID NO: 646, SEQ ID NO: 647, SEQ ID NO: 648, SEQ ID NO: 649, SEQ ID NO: 650, SEQ ID NO: 651, SEQ ID NO: 652, SEQ ID NO: 653, SEQ ID NO: 654, SEQ ID NO: 655, SEQ ID NO: 656, SEQ ID NO: 657, SEQ ID NO: 658, SEQ ID NO: 659, SEQ ID NO: 660, SEQ ID NO: 661, SEQ ID NO: 662, SEQ ID NO: 663, SEQ ID NO: 664, SEQ ID NO: 665, SEQ ID NO: 666, SEQ ID NO: 667, SEQ ID NO: 668, SEQ ID NO: 669, SEQ ID NO: 670, SEQ ID NO: 671, SEQ ID NO: 672, SEQ ID NO: 673, SEQ ID NO: 674, SEQ ID NO: 675, SEQ ID NO: 676, SEQ ID NO: 677, SEQ ID NO: 678, SEQ ID NO: 679, SEQ ID NO: 680, SEQ ID NO: 681, SEQ ID NO: 682, SEQ ID NO: 683, SEQ ID NO: 684, SEQ ID NO: 685, SEQ ID NO: 686, SEQ ID NO: 687, SEQ ID NO: 688, SEQ ID NO: 689, SEQ ID NO: 690, SEQ ID NO: 691, SEQ ID NO: 692, SEQ ID NO: 693, SEQ ID NO: 694, SEQ ID NO: 695, or SEQ ID NO: 696.

[0696] In some examples of any of the ABPCs described herein, the first antigen-binding domain includes a light chain variable domain comprising SEQ ID NO: 734, and a heavy chain variable domain comprising: SEQ ID NO: 502, SEQ ID NO: 510, SEQ ID NO: 511, SEQ ID NO: 512, SEQ ID NO: 513, SEQ ID NO: 514, SEQ ID NO: 515, SEQ ID NO: 516, SEQ ID NO: 517, SEQ ID NO: 518, SEQ ID NO: 519, SEQ ID NO: 520, SEQ ID NO: 521, SEQ ID NO: 522, SEQ ID NO: 523, SEQ ID NO: 524, SEQ ID NO: 525, SEQ ID NO: 526, SEQ ID NO: 527, SEQ ID NO: 528, SEQ ID NO: 529, SEQ ID NO: 530, SEQ ID NO: 531, SEQ ID NO: 532, SEQ ID NO: 533, SEQ ID NO: 534, SEQ ID NO: 535, SEQ ID NO: 536, SEQ ID NO: 537, SEQ ID NO: 538, SEQ ID NO: 539, SEQ ID NO: 540, SEQ ID NO: 541, SEQ ID NO: 542, SEQ ID NO: 543, SEQ ID NO: 544, SEQ ID NO: 545, SEQ ID NO: 546, SEQ ID NO: 547, SEQ ID NO: 548, SEQ ID NO: 577, SEQ ID NO: 578, SEQ ID NO: 579, SEQ ID NO: 580, SEQ ID NO: 581, SEQ ID NO: 582, SEQ ID NO: 583, SEQ ID NO: 584, SEQ ID NO: 585, SEQ ID NO: 586, SEQ ID NO: 587, SEQ ID NO: 588, SEQ ID NO: 589, SEQ ID NO: 590, SEQ ID NO: 591, SEQ ID NO: 592, SEQ ID NO: 593, SEQ ID NO: 594, SEQ ID NO: 595, SEQ ID NO: 596, SEQ ID NO: 597, SEQ ID NO: 598, SEQ ID NO: 599, SEQ ID NO: 600, SEQ ID NO: 601, SEQ ID NO: 602, SEQ ID NO: 603, SEQ ID NO: 604, SEQ ID NO: 605, SEQ ID NO: 606, SEQ ID NO: 607, SEQ ID NO: 608, SEQ ID NO: 609, SEQ ID NO: 610, SEQ ID NO: 611, SEQ ID NO: 612, SEQ ID NO: 613, SEQ ID NO: 614, SEQ ID NO: 615, SEQ ID NO: 616, SEQ ID NO: 617, SEQ ID NO: 618, SEQ ID NO: 619, SEQ ID NO: 620, SEQ ID NO: 621, SEQ ID NO: 622, SEQ ID NO: 623, SEQ ID NO: 624, SEQ ID NO: 625, SEQ ID NO: 626, SEQ ID NO: 627, SEQ ID NO: 628, SEQ ID NO: 629, SEQ ID NO: 630, SEQ ID NO: 631, SEQ ID NO: 632, SEQ ID NO: 633, SEQ ID NO: 634, SEQ ID NO: 635, SEQ ID NO: 636, SEQ ID NO: 637, SEQ ID NO: 638, SEQ ID NO: 639, SEQ ID NO: 640, SEQ ID NO: 641, SEQ ID NO: 642, SEQ ID NO: 643, SEQ ID NO: 644, SEQ ID NO: 645, SEQ ID NO: 646, SEQ ID NO: 647, SEQ ID NO: 648, SEQ ID NO: 649, SEQ ID NO: 650, SEQ ID NO: 651, SEQ ID NO: 652, SEQ ID NO: 653, SEQ ID NO: 654, SEQ ID NO: 655, SEQ ID NO: 656, SEQ ID NO: 657, SEQ ID NO: 658, SEQ ID NO: 659, SEQ ID NO: 660, SEQ ID NO: 661, SEQ ID NO: 662, SEQ ID NO: 663, SEQ ID NO: 664, SEQ ID NO: 665, SEQ ID NO: 666, SEQ ID NO: 667, SEQ ID NO: 668, SEQ ID NO: 669, SEQ ID NO: 670, SEQ ID NO: 671, SEQ ID NO: 672, SEQ ID NO: 673, SEQ ID NO: 674, SEQ ID NO: 675, SEQ ID NO: 676, SEQ ID NO: 677, SEQ ID NO: 678, SEQ ID NO: 679, SEQ ID NO: 680, SEQ ID NO: 681, SEQ ID NO: 682, SEQ ID NO: 683, SEQ ID NO: 684, SEQ ID NO: 685, SEQ ID NO: 686, SEQ ID NO: 687, SEQ ID NO: 688, SEQ ID NO: 689, SEQ ID NO: 690, SEQ ID NO: 691, SEQ ID NO: 692, SEQ ID NO: 693, SEQ ID NO: 694, SEQ ID NO: 695, or SEQ ID NO: 696.

[0697] In some examples of any of the ABPCs described herein, the first antigen-binding domain includes a light chain variable domain comprising SEQ ID NO: 735, and a heavy chain variable domain comprising: SEQ ID NO: 502, SEQ ID NO: 510, SEQ ID NO: 511, SEQ ID NO: 512, SEQ ID NO: 513, SEQ ID NO: 514, SEQ ID NO: 515, SEQ ID NO: 516, SEQ ID NO: 517, SEQ ID NO: 518, SEQ ID NO: 519, SEQ ID NO: 520, SEQ ID NO: 521, SEQ ID NO: 522, SEQ ID NO: 523, SEQ ID NO: 524, SEQ ID NO: 525, SEQ ID NO: 526, SEQ ID NO: 527, SEQ ID NO: 528, SEQ ID NO: 529, SEQ ID NO: 530, SEQ ID NO: 531, SEQ ID NO: 532, SEQ ID NO: 533, SEQ ID NO: 534, SEQ ID NO: 535, SEQ ID NO: 536, SEQ ID NO: 537, SEQ ID NO: 538, SEQ ID NO: 539, SEQ ID NO: 540, SEQ ID NO: 541, SEQ ID NO: 542, SEQ ID NO: 543, SEQ ID NO: 544, SEQ ID NO: 545, SEQ ID NO: 546, SEQ ID NO: 547, SEQ ID NO: 548, SEQ ID NO: 577, SEQ ID NO: 578, SEQ ID NO: 579, SEQ ID NO: 580, SEQ ID NO: 581, SEQ ID NO: 582, SEQ ID NO: 583, SEQ ID NO: 584, SEQ ID NO: 585, SEQ ID NO: 586, SEQ ID NO: 587, SEQ ID NO: 588, SEQ ID NO: 589, SEQ ID NO: 590, SEQ ID NO: 591, SEQ ID NO: 592, SEQ ID NO: 593, SEQ ID NO: 594, SEQ ID NO: 595, SEQ ID NO: 596, SEQ ID NO: 597, SEQ ID NO: 598, SEQ ID NO: 599, SEQ ID NO: 600, SEQ ID NO: 601, SEQ ID NO: 602, SEQ ID NO: 603, SEQ ID NO: 604, SEQ ID NO: 605, SEQ ID NO: 606, SEQ ID NO: 607, SEQ ID NO: 608, SEQ ID NO: 609, SEQ ID NO: 610, SEQ ID NO: 611, SEQ ID NO: 612, SEQ ID NO: 613, SEQ ID NO: 614, SEQ ID NO: 615, SEQ ID NO: 616, SEQ ID NO: 617, SEQ ID NO: 618, SEQ ID NO: 619, SEQ ID NO: 620, SEQ ID NO: 621, SEQ ID NO: 622, SEQ ID NO: 623, SEQ ID NO: 624, SEQ ID NO: 625, SEQ ID NO: 626, SEQ ID NO: 627, SEQ ID NO: 628, SEQ ID NO: 629, SEQ ID NO: 630, SEQ ID NO: 631, SEQ ID NO: 632, SEQ ID NO: 633, SEQ ID NO: 634, SEQ ID NO: 635, SEQ ID NO: 636, SEQ ID NO: 637, SEQ ID NO: 638, SEQ ID NO: 639, SEQ ID NO: 640, SEQ ID NO: 641, SEQ ID NO: 642, SEQ ID NO: 643, SEQ ID NO: 644, SEQ ID NO: 645, SEQ ID NO: 646, SEQ ID NO: 647, SEQ ID NO: 648, SEQ ID NO: 649, SEQ ID NO: 650, SEQ ID NO: 651, SEQ ID NO: 652, SEQ ID NO: 653, SEQ ID NO: 654, SEQ ID NO: 655, SEQ ID NO: 656, SEQ ID NO: 657, SEQ ID NO: 658, SEQ ID NO: 659, SEQ ID NO: 660, SEQ ID NO: 661, SEQ ID NO: 662, SEQ ID NO: 663, SEQ ID NO: 664, SEQ ID NO: 665, SEQ ID NO: 666, SEQ ID NO: 667, SEQ ID NO: 668, SEQ ID NO: 669, SEQ ID NO: 670, SEQ ID NO: 671, SEQ ID NO: 672, SEQ ID NO: 673, SEQ ID NO: 674, SEQ ID NO: 675, SEQ ID NO: 676, SEQ ID NO: 677, SEQ ID NO: 678, SEQ ID NO: 679, SEQ ID NO: 680, SEQ ID NO: 681, SEQ ID NO: 682, SEQ ID NO: 683, SEQ ID NO: 684, SEQ ID NO: 685, SEQ ID NO: 686, SEQ ID NO: 687, SEQ ID NO: 688, SEQ ID NO: 689, SEQ ID NO: 690, SEQ ID NO: 691, SEQ ID NO: 692, SEQ ID NO: 693, SEQ ID NO: 694, SEQ ID NO: 695, or SEQ ID NO: 696.

[0698] In some examples of any of the ABPCs described herein, the first antigen-binding domain includes a light chain variable domain comprising SEQ ID NO: 736, and a heavy chain variable domain comprising: SEQ ID NO: 502, SEQ ID NO: 510, SEQ ID NO: 511, SEQ ID NO: 512, SEQ ID NO: 513, SEQ ID NO: 514, SEQ ID NO: 515, SEQ ID NO: 516, SEQ ID NO: 517, SEQ ID NO: 518, SEQ ID NO: 519, SEQ ID NO: 520, SEQ ID NO: 521, SEQ ID NO: 522, SEQ ID NO: 523, SEQ ID NO: 524, SEQ ID NO: 525, SEQ ID NO: 526, SEQ ID NO: 527, SEQ ID NO: 528, SEQ ID NO: 529, SEQ ID NO: 530, SEQ ID NO: 531, SEQ ID NO: 532, SEQ ID NO: 533, SEQ ID NO: 534, SEQ ID NO: 535, SEQ ID NO: 536, SEQ ID NO: 537, SEQ ID NO: 538, SEQ ID NO: 539, SEQ ID NO: 540, SEQ ID NO: 541, SEQ ID NO: 542, SEQ ID NO: 543, SEQ ID NO: 544, SEQ ID NO: 545, SEQ ID NO: 546, SEQ ID NO: 547, SEQ ID NO: 548, SEQ ID NO: 577, SEQ ID NO: 578, SEQ ID NO: 579, SEQ ID NO: 580, SEQ ID NO: 581, SEQ ID NO: 582, SEQ ID NO: 583, SEQ ID NO: 584, SEQ ID NO: 585, SEQ ID NO: 586, SEQ ID NO: 587, SEQ ID NO: 588, SEQ ID NO: 589, SEQ ID NO: 590, SEQ ID NO: 591, SEQ ID NO: 592, SEQ ID NO: 593, SEQ ID NO: 594, SEQ ID NO: 595, SEQ ID NO: 596, SEQ ID NO: 597, SEQ ID NO: 598, SEQ ID NO: 599, SEQ ID NO: 600, SEQ ID NO: 601, SEQ ID NO: 602, SEQ ID NO: 603, SEQ ID NO: 604, SEQ ID NO: 605, SEQ ID NO: 606, SEQ ID NO: 607, SEQ ID NO: 608, SEQ ID NO: 609, SEQ ID NO: 610, SEQ ID NO: 611, SEQ ID NO: 612, SEQ ID NO: 613, SEQ ID NO: 614, SEQ ID NO: 615, SEQ ID NO: 616, SEQ ID NO: 617, SEQ ID NO: 618, SEQ ID NO: 619, SEQ ID NO: 620, SEQ ID NO: 621, SEQ ID NO: 622, SEQ ID NO: 623, SEQ ID NO: 624, SEQ ID NO: 625, SEQ ID NO: 626, SEQ ID NO: 627, SEQ ID NO: 628, SEQ ID NO: 629, SEQ ID NO: 630, SEQ ID NO: 631, SEQ ID NO: 632, SEQ ID NO: 633, SEQ ID NO: 634, SEQ ID NO: 635, SEQ ID NO: 636, SEQ ID NO: 637, SEQ ID NO: 638, SEQ ID NO: 639, SEQ ID NO: 640, SEQ ID NO: 641, SEQ ID NO: 642, SEQ ID NO: 643, SEQ ID NO: 644, SEQ ID NO: 645, SEQ ID NO: 646, SEQ ID NO: 647, SEQ ID NO: 648, SEQ ID NO: 649, SEQ ID NO: 650, SEQ ID NO: 651, SEQ ID NO: 652, SEQ ID NO: 653, SEQ ID NO: 654, SEQ ID NO: 655, SEQ ID NO: 656, SEQ ID NO: 657, SEQ ID NO: 658, SEQ ID NO: 659, SEQ ID NO: 660, SEQ ID NO: 661, SEQ ID NO: 662, SEQ ID NO: 663, SEQ ID NO: 664, SEQ ID NO: 665, SEQ ID NO: 666, SEQ ID NO: 667, SEQ ID NO: 668, SEQ ID NO: 669, SEQ ID NO: 670, SEQ ID NO: 671, SEQ ID NO: 672, SEQ ID NO: 673, SEQ ID NO: 674, SEQ ID NO: 675, SEQ ID NO: 676, SEQ ID NO: 677, SEQ ID NO: 678, SEQ ID NO: 679, SEQ ID NO: 680, SEQ ID NO: 681, SEQ ID NO: 682, SEQ ID NO: 683, SEQ ID NO: 684, SEQ ID NO: 685, SEQ ID NO: 686, SEQ ID NO: 687, SEQ ID NO: 688, SEQ ID NO: 689, SEQ ID NO: 690, SEQ ID NO: 691, SEQ ID NO: 692, SEQ ID NO: 693, SEQ ID NO: 694, SEQ ID NO: 695, or SEQ ID NO: 696.

[0699] In some examples of any of the ABPCs described herein, the first antigen-binding domain includes a light chain variable domain comprising SEQ ID NO: 737, and a heavy chain variable domain comprising: SEQ ID NO: 502, SEQ ID NO: 510, SEQ ID NO: 511, SEQ ID NO: 512, SEQ ID NO: 513, SEQ ID NO: 514, SEQ ID NO: 515, SEQ ID NO: 516, SEQ ID NO: 517, SEQ ID NO: 518, SEQ ID NO: 519, SEQ ID NO: 520, SEQ ID NO: 521, SEQ ID NO: 522, SEQ ID NO: 523, SEQ ID NO: 524, SEQ ID NO: 525, SEQ ID NO: 526, SEQ ID NO: 527, SEQ ID NO: 528, SEQ ID NO: 529, SEQ ID NO: 530, SEQ ID NO: 531, SEQ ID NO: 532, SEQ ID NO: 533, SEQ ID NO: 534, SEQ ID NO: 535, SEQ ID NO: 536, SEQ ID NO: 537, SEQ ID NO: 538, SEQ ID NO: 539, SEQ ID NO: 540, SEQ ID NO: 541, SEQ ID NO: 542, SEQ ID NO: 543, SEQ ID NO: 544, SEQ ID NO: 545, SEQ ID NO: 546, SEQ ID NO: 547, SEQ ID NO: 548, SEQ ID NO: 577, SEQ ID NO: 578, SEQ ID NO: 579, SEQ ID NO: 580, SEQ ID NO: 581, SEQ ID NO: 582, SEQ ID NO: 583, SEQ ID NO: 584, SEQ ID NO: 585, SEQ ID NO: 586, SEQ ID NO: 587, SEQ ID NO: 588, SEQ ID NO: 589, SEQ ID NO: 590, SEQ ID NO: 591, SEQ ID NO: 592, SEQ ID NO: 593, SEQ ID NO: 594, SEQ ID NO: 595, SEQ ID NO: 596, SEQ ID NO: 597, SEQ ID NO: 598, SEQ ID NO: 599, SEQ ID NO: 600, SEQ ID NO: 601, SEQ ID NO: 602, SEQ ID NO: 603, SEQ ID NO: 604, SEQ ID NO: 605, SEQ ID NO: 606, SEQ ID NO: 607, SEQ ID NO: 608, SEQ ID NO: 609, SEQ ID NO: 610, SEQ ID NO: 611, SEQ ID NO: 612, SEQ ID NO: 613, SEQ ID NO: 614, SEQ ID NO: 615, SEQ ID NO: 616, SEQ ID NO: 617, SEQ ID NO: 618, SEQ ID NO: 619, SEQ ID NO: 620, SEQ ID NO: 621, SEQ ID NO: 622, SEQ ID NO: 623, SEQ ID NO: 624, SEQ ID NO: 625, SEQ ID NO: 626, SEQ ID NO: 627, SEQ ID NO: 628, SEQ ID NO: 629, SEQ ID NO: 630, SEQ ID NO: 631, SEQ ID NO: 632, SEQ ID NO: 633, SEQ ID NO: 634, SEQ ID NO: 635, SEQ ID NO: 636, SEQ ID NO: 637, SEQ ID NO: 638, SEQ ID NO: 639, SEQ ID NO: 640, SEQ ID NO: 641, SEQ ID NO: 642, SEQ ID NO: 643, SEQ ID NO: 644, SEQ ID NO: 645, SEQ ID NO: 646, SEQ ID NO: 647, SEQ ID NO: 648, SEQ ID NO: 649, SEQ ID NO: 650, SEQ ID NO: 651, SEQ ID NO: 652, SEQ ID NO: 653, SEQ ID NO: 654, SEQ ID NO: 655, SEQ ID NO: 656, SEQ ID NO: 657, SEQ ID NO: 658, SEQ ID NO: 659, SEQ ID NO: 660, SEQ ID NO: 661, SEQ ID NO: 662, SEQ ID NO: 663, SEQ ID NO: 664, SEQ ID NO: 665, SEQ ID NO: 666, SEQ ID NO: 667, SEQ ID NO: 668, SEQ ID NO: 669, SEQ ID NO: 670, SEQ ID NO: 671, SEQ ID NO: 672, SEQ ID NO: 673, SEQ ID NO: 674, SEQ ID NO: 675, SEQ ID NO: 676, SEQ ID NO: 677, SEQ ID NO: 678, SEQ ID NO: 679, SEQ ID NO: 680, SEQ ID NO: 681, SEQ ID NO: 682, SEQ ID NO: 683, SEQ ID NO: 684, SEQ ID NO: 685, SEQ ID NO: 686, SEQ ID NO: 687, SEQ ID NO: 688, SEQ ID NO: 689, SEQ ID NO: 690, SEQ ID NO: 691, SEQ ID NO: 692, SEQ ID NO: 693, SEQ ID NO: 694, SEQ ID NO: 695, or SEQ ID NO: 696.

[0700] In some examples of any of the ABPCs described herein, the first antigen-binding domain includes a light chain variable domain comprising SEQ ID NO: 738, and a heavy chain variable domain comprising: SEQ ID NO: 502, SEQ ID NO: 510, SEQ ID NO: 511, SEQ ID NO: 512, SEQ ID NO: 513, SEQ ID NO: 514, SEQ ID NO: 515, SEQ ID NO: 516, SEQ ID NO: 517, SEQ ID NO: 518, SEQ ID NO: 519, SEQ ID NO: 520, SEQ ID NO: 521, SEQ ID NO: 522, SEQ ID NO: 523, SEQ ID NO: 524, SEQ ID NO: 525, SEQ ID NO: 526, SEQ ID NO: 527, SEQ ID NO: 528, SEQ ID NO: 529, SEQ ID NO: 530, SEQ ID NO: 531, SEQ ID NO: 532, SEQ ID NO: 533, SEQ ID NO: 534, SEQ ID NO: 535, SEQ ID NO: 536, SEQ ID NO: 537, SEQ ID NO: 538, SEQ ID NO: 539, SEQ ID NO: 540, SEQ ID NO: 541, SEQ ID NO: 542, SEQ ID NO: 543, SEQ ID NO: 544, SEQ ID NO: 545, SEQ ID NO: 546, SEQ ID NO: 547, SEQ ID NO: 548, SEQ ID NO: 577, SEQ ID NO: 578, SEQ ID NO: 579, SEQ ID NO: 580, SEQ ID NO: 581, SEQ ID NO: 582, SEQ ID NO: 583, SEQ ID NO: 584, SEQ ID NO: 585, SEQ ID NO: 586, SEQ ID NO: 587, SEQ ID NO: 588, SEQ ID NO: 589, SEQ ID NO: 590, SEQ ID NO: 591, SEQ ID NO: 592, SEQ ID NO: 593, SEQ ID NO: 594, SEQ ID NO: 595, SEQ ID NO: 596, SEQ ID NO: 597, SEQ ID NO: 598, SEQ ID NO: 599, SEQ ID NO: 600, SEQ ID NO: 601, SEQ ID NO: 602, SEQ ID NO: 603, SEQ ID NO: 604, SEQ ID NO: 605, SEQ ID NO: 606, SEQ ID NO: 607, SEQ ID NO: 608, SEQ ID NO: 609, SEQ ID NO: 610, SEQ ID NO: 611, SEQ ID NO: 612, SEQ ID NO: 613, SEQ ID NO: 614, SEQ ID NO: 615, SEQ ID NO: 616, SEQ ID NO: 617, SEQ ID NO: 618, SEQ ID NO: 619, SEQ ID NO: 620, SEQ ID NO: 621, SEQ ID NO: 622, SEQ ID NO: 623, SEQ ID NO: 624, SEQ ID NO: 625, SEQ ID NO: 626, SEQ ID NO: 627, SEQ ID NO: 628, SEQ ID NO: 629, SEQ ID NO: 630, SEQ ID NO: 631, SEQ ID NO: 632, SEQ ID NO: 633, SEQ ID NO: 634, SEQ ID NO: 635, SEQ ID NO: 636, SEQ ID NO: 637, SEQ ID NO: 638, SEQ ID NO: 639, SEQ ID NO: 640, SEQ ID NO: 641, SEQ ID NO: 642, SEQ ID NO: 643, SEQ ID NO: 644, SEQ ID NO: 645, SEQ ID NO: 646, SEQ ID NO: 647, SEQ ID NO: 648, SEQ ID NO: 649, SEQ ID NO: 650, SEQ ID NO: 651, SEQ ID NO: 652, SEQ ID NO: 653, SEQ ID NO: 654, SEQ ID NO: 655, SEQ ID NO: 656, SEQ ID NO: 657, SEQ ID NO: 658, SEQ ID NO: 659, SEQ ID NO: 660, SEQ ID NO: 661, SEQ ID NO: 662, SEQ ID NO: 663, SEQ ID NO: 664, SEQ ID NO: 665, SEQ ID NO: 666, SEQ ID NO: 667, SEQ ID NO: 668, SEQ ID NO: 669, SEQ ID NO: 670, SEQ ID NO: 671, SEQ ID NO: 672, SEQ ID NO: 673, SEQ ID NO: 674, SEQ ID NO: 675, SEQ ID NO: 676, SEQ ID NO: 677, SEQ ID NO: 678, SEQ ID NO: 679, SEQ ID NO: 680, SEQ ID NO: 681, SEQ ID NO: 682, SEQ ID NO: 683, SEQ ID NO: 684, SEQ ID NO: 685, SEQ ID NO: 686, SEQ ID NO: 687, SEQ ID NO: 688, SEQ ID NO: 689, SEQ ID NO: 690, SEQ ID NO: 691, SEQ ID NO: 692, SEQ ID NO: 693, SEQ ID NO: 694, SEQ ID NO: 695, or SEQ ID NO: 696.

[0701] In some examples of any of the ABPCs described herein, the first antigen-binding domain includes a light chain variable domain comprising SEQ ID NO: 739, and a heavy chain variable domain comprising: SEQ ID NO: 502, SEQ ID NO: 510, SEQ ID NO: 511, SEQ ID NO: 512, SEQ ID NO: 513, SEQ ID NO: 514, SEQ ID NO: 515, SEQ ID NO: 516, SEQ ID NO: 517, SEQ ID NO: 518, SEQ ID NO: 519, SEQ ID NO: 520, SEQ ID NO: 521, SEQ ID NO: 522, SEQ ID NO: 523, SEQ ID NO: 524, SEQ ID NO: 525, SEQ ID NO: 526, SEQ ID NO: 527, SEQ ID NO: 528, SEQ ID NO: 529, SEQ ID NO: 530, SEQ ID NO: 531, SEQ ID NO: 532, SEQ ID NO: 533, SEQ ID NO: 534, SEQ ID NO: 535, SEQ ID NO: 536, SEQ ID NO: 537, SEQ ID NO: 538, SEQ ID NO: 539, SEQ ID NO: 540, SEQ ID NO: 541, SEQ ID NO: 542, SEQ ID NO: 543, SEQ ID NO: 544, SEQ ID NO: 545, SEQ ID NO: 546, SEQ ID NO: 547, SEQ ID NO: 548, SEQ ID NO: 577, SEQ ID NO: 578, SEQ ID NO: 579, SEQ ID NO: 580, SEQ ID NO: 581, SEQ ID NO: 582, SEQ ID NO: 583, SEQ ID NO: 584, SEQ ID NO: 585, SEQ ID NO: 586, SEQ ID NO: 587, SEQ ID NO: 588, SEQ ID NO: 589, SEQ ID NO: 590, SEQ ID NO: 591, SEQ ID NO: 592, SEQ ID NO: 593, SEQ ID NO: 594, SEQ ID NO: 595, SEQ ID NO: 596, SEQ ID NO: 597, SEQ ID NO: 598, SEQ ID NO: 599, SEQ ID NO: 600, SEQ ID NO: 601, SEQ ID NO: 602, SEQ ID NO: 603, SEQ ID NO: 604, SEQ ID NO: 605, SEQ ID NO: 606, SEQ ID NO: 607, SEQ ID NO: 608, SEQ ID NO: 609, SEQ ID NO: 610, SEQ ID NO: 611, SEQ ID NO: 612, SEQ ID NO: 613, SEQ ID NO: 614, SEQ ID NO: 615, SEQ ID NO: 616, SEQ ID NO: 617, SEQ ID NO: 618, SEQ ID NO: 619, SEQ ID NO: 620, SEQ ID NO: 621, SEQ ID NO: 622, SEQ ID NO: 623, SEQ ID NO: 624, SEQ ID NO: 625, SEQ ID NO: 626, SEQ ID NO: 627, SEQ ID NO: 628, SEQ ID NO: 629, SEQ ID NO: 630, SEQ ID NO: 631, SEQ ID NO: 632, SEQ ID NO: 633, SEQ ID NO: 634, SEQ ID NO: 635, SEQ ID NO: 636, SEQ ID NO: 637, SEQ ID NO: 638, SEQ ID NO: 639, SEQ ID NO: 640, SEQ ID NO: 641, SEQ ID NO: 642, SEQ ID NO: 643, SEQ ID NO: 644, SEQ ID NO: 645, SEQ ID NO: 646, SEQ ID NO: 647, SEQ ID NO: 648, SEQ ID NO: 649, SEQ ID NO: 650, SEQ ID NO: 651, SEQ ID NO: 652, SEQ ID NO: 653, SEQ ID NO: 654, SEQ ID NO: 655, SEQ ID NO: 656, SEQ ID NO: 657, SEQ ID NO: 658, SEQ ID NO: 659, SEQ ID NO: 660, SEQ ID NO: 661, SEQ ID NO: 662, SEQ ID NO: 663, SEQ ID NO: 664, SEQ ID NO: 665, SEQ ID NO: 666, SEQ ID NO: 667, SEQ ID NO: 668, SEQ ID NO: 669, SEQ ID NO: 670, SEQ ID NO: 671, SEQ ID NO: 672, SEQ ID NO: 673, SEQ ID NO: 674, SEQ ID NO: 675, SEQ ID NO: 676, SEQ ID NO: 677, SEQ ID NO: 678, SEQ ID NO: 679, SEQ ID NO: 680, SEQ ID NO: 681, SEQ ID NO: 682, SEQ ID NO: 683, SEQ ID NO: 684, SEQ ID NO: 685, SEQ ID NO: 686, SEQ ID NO: 687, SEQ ID NO: 688, SEQ ID NO: 689, SEQ ID NO: 690, SEQ ID NO: 691, SEQ ID NO: 692, SEQ ID NO: 693, SEQ ID NO: 694, SEQ ID NO: 695, or SEQ ID NO: 696.

[0702] In some examples of any of the ABPCs described herein, the first antigen-binding domain includes a light chain variable domain comprising SEQ ID NO: 740, and a heavy chain variable domain comprising: SEQ ID NO: 502, SEQ ID NO: 510, SEQ ID NO: 511, SEQ ID NO: 512, SEQ ID NO: 513, SEQ ID NO: 514, SEQ ID NO: 515, SEQ ID NO: 516, SEQ ID NO: 517, SEQ ID NO: 518, SEQ ID NO: 519, SEQ ID NO: 520, SEQ ID NO: 521, SEQ ID NO: 522, SEQ ID NO: 523, SEQ ID NO: 524, SEQ ID NO: 525, SEQ ID NO: 526, SEQ ID NO: 527, SEQ ID NO: 528, SEQ ID NO: 529, SEQ ID NO: 530, SEQ ID NO: 531, SEQ ID NO: 532, SEQ ID NO: 533, SEQ ID NO: 534, SEQ ID NO: 535, SEQ ID NO: 536, SEQ ID NO: 537, SEQ ID NO: 538, SEQ ID NO: 539, SEQ ID NO: 540, SEQ ID NO: 541, SEQ ID NO: 542, SEQ ID NO: 543, SEQ ID NO: 544, SEQ ID NO: 545, SEQ ID NO: 546, SEQ ID NO: 547, SEQ ID NO: 548, SEQ ID NO: 577, SEQ ID NO: 578, SEQ ID NO: 579, SEQ ID NO: 580, SEQ ID NO: 581, SEQ ID NO: 582, SEQ ID NO: 583, SEQ ID NO: 584, SEQ ID NO: 585, SEQ ID NO: 586, SEQ ID NO: 587, SEQ ID NO: 588, SEQ ID NO: 589, SEQ ID NO: 590, SEQ ID NO: 591, SEQ ID NO: 592, SEQ ID NO: 593, SEQ ID NO: 594, SEQ ID NO: 595, SEQ ID NO: 596, SEQ ID NO: 597, SEQ ID NO: 598, SEQ ID NO: 599, SEQ ID NO: 600, SEQ ID NO: 601, SEQ ID NO: 602, SEQ ID NO: 603, SEQ ID NO: 604, SEQ ID NO: 605, SEQ ID NO: 606, SEQ ID NO: 607, SEQ ID NO: 608, SEQ ID NO: 609, SEQ ID NO: 610, SEQ ID NO: 611, SEQ ID NO: 612, SEQ ID NO: 613, SEQ ID NO: 614, SEQ ID NO: 615, SEQ ID NO: 616, SEQ ID NO: 617, SEQ ID NO: 618, SEQ ID NO: 619, SEQ ID NO: 620, SEQ ID NO: 621, SEQ ID NO: 622, SEQ ID NO: 623, SEQ ID NO: 624, SEQ ID NO: 625, SEQ ID NO: 626, SEQ ID NO: 627, SEQ ID NO: 628, SEQ ID NO: 629, SEQ ID NO: 630, SEQ ID NO: 631, SEQ ID NO: 632, SEQ ID NO: 633, SEQ ID NO: 634, SEQ ID NO: 635, SEQ ID NO: 636, SEQ ID NO: 637, SEQ ID NO: 638, SEQ ID NO: 639, SEQ ID NO: 640, SEQ ID NO: 641, SEQ ID NO: 642, SEQ ID NO: 643, SEQ ID NO: 644, SEQ ID NO: 645, SEQ ID NO: 646, SEQ ID NO: 647, SEQ ID NO: 648, SEQ ID NO: 649, SEQ ID NO: 650, SEQ ID NO: 651, SEQ ID NO: 652, SEQ ID NO: 653, SEQ ID NO: 654, SEQ ID NO: 655, SEQ ID NO: 656, SEQ ID NO: 657, SEQ ID NO: 658, SEQ ID NO: 659, SEQ ID NO: 660, SEQ ID NO: 661, SEQ ID NO: 662, SEQ ID NO: 663, SEQ ID NO: 664, SEQ ID NO: 665, SEQ ID NO: 666, SEQ ID NO: 667, SEQ ID NO: 668, SEQ ID NO: 669, SEQ ID NO: 670, SEQ ID NO: 671, SEQ ID NO: 672, SEQ ID NO: 673, SEQ ID NO: 674, SEQ ID NO: 675, SEQ ID NO: 676, SEQ ID NO: 677, SEQ ID NO: 678, SEQ ID NO: 679, SEQ ID NO: 680, SEQ ID NO: 681, SEQ ID NO: 682, SEQ ID NO: 683, SEQ ID NO: 684, SEQ ID NO: 685, SEQ ID NO: 686, SEQ ID NO: 687, SEQ ID NO: 688, SEQ ID NO: 689, SEQ ID NO: 690, SEQ ID NO: 691, SEQ ID NO: 692, SEQ ID NO: 693, SEQ ID NO: 694, SEQ ID NO: 695, or SEQ ID NO: 696.

[0703] In some examples of any of the ABPCs described herein, the first antigen-binding domain includes a light chain variable domain comprising SEQ ID NO: 741, and a heavy chain variable domain comprising: SEQ ID NO: 502, SEQ ID NO: 510, SEQ ID NO: 511, SEQ ID NO: 512, SEQ ID NO: 513, SEQ ID NO: 514, SEQ ID NO: 515, SEQ ID NO: 516, SEQ ID NO: 517, SEQ ID NO: 518, SEQ ID NO: 519, SEQ ID NO: 520, SEQ ID NO: 521, SEQ ID NO: 522, SEQ ID NO: 523, SEQ ID NO: 524, SEQ ID NO: 525, SEQ ID NO: 526, SEQ ID NO: 527, SEQ ID NO: 528, SEQ ID NO: 529, SEQ ID NO: 530, SEQ ID NO: 531, SEQ ID NO: 532, SEQ ID NO: 533, SEQ ID NO: 534, SEQ ID NO: 535, SEQ ID NO: 536, SEQ ID NO: 537, SEQ ID NO: 538, SEQ ID NO: 539, SEQ ID NO: 540, SEQ ID NO: 541, SEQ ID NO: 542, SEQ ID NO: 543, SEQ ID NO: 544, SEQ ID NO: 545, SEQ ID NO: 546, SEQ ID NO: 547, SEQ ID NO: 548, SEQ ID NO: 577, SEQ ID NO: 578, SEQ ID NO: 579, SEQ ID NO: 580, SEQ ID NO: 581, SEQ ID NO: 582, SEQ ID NO: 583, SEQ ID NO: 584, SEQ ID NO: 585, SEQ ID NO: 586, SEQ ID NO: 587, SEQ ID NO: 588, SEQ ID NO: 589, SEQ ID NO: 590, SEQ ID NO: 591, SEQ ID NO: 592, SEQ ID NO: 593, SEQ ID NO: 594, SEQ ID NO: 595, SEQ ID NO: 596, SEQ ID NO: 597, SEQ ID NO: 598, SEQ ID NO: 599, SEQ ID NO: 600, SEQ ID NO: 601, SEQ ID NO: 602, SEQ ID NO: 603, SEQ ID NO: 604, SEQ ID NO: 605, SEQ ID NO: 606, SEQ ID NO: 607, SEQ ID NO: 608, SEQ ID NO: 609, SEQ ID NO: 610, SEQ ID NO: 611, SEQ ID NO: 612, SEQ ID NO: 613, SEQ ID NO: 614, SEQ ID NO: 615, SEQ ID NO: 616, SEQ ID NO: 617, SEQ ID NO: 618, SEQ ID NO: 619, SEQ ID NO: 620, SEQ ID NO: 621, SEQ ID NO: 622, SEQ ID NO: 623, SEQ ID NO: 624, SEQ ID NO: 625, SEQ ID NO: 626, SEQ ID NO: 627, SEQ ID NO: 628, SEQ ID NO: 629, SEQ ID NO: 630, SEQ ID NO: 631, SEQ ID NO: 632, SEQ ID NO: 633, SEQ ID NO: 634, SEQ ID NO: 635, SEQ ID NO: 636, SEQ ID NO: 637, SEQ ID NO: 638, SEQ ID NO: 639, SEQ ID NO: 640, SEQ ID NO: 641, SEQ ID NO: 642, SEQ ID NO: 643, SEQ ID NO: 644, SEQ ID NO: 645, SEQ ID NO: 646, SEQ ID NO: 647, SEQ ID NO: 648, SEQ ID NO: 649, SEQ ID NO: 650, SEQ ID NO: 651, SEQ ID NO: 652, SEQ ID NO: 653, SEQ ID NO: 654, SEQ ID NO: 655, SEQ ID NO: 656, SEQ ID NO: 657, SEQ ID NO: 658, SEQ ID NO: 659, SEQ ID NO: 660, SEQ ID NO: 661, SEQ ID NO: 662, SEQ ID NO: 663, SEQ ID NO: 664, SEQ ID NO: 665, SEQ ID NO: 666, SEQ ID NO: 667, SEQ ID NO: 668, SEQ ID NO: 669, SEQ ID NO: 670, SEQ ID NO: 671, SEQ ID NO: 672, SEQ ID NO: 673, SEQ ID NO: 674, SEQ ID NO: 675, SEQ ID NO: 676, SEQ ID NO: 677, SEQ ID NO: 678, SEQ ID NO: 679, SEQ ID NO: 680, SEQ ID NO: 681, SEQ ID NO: 682, SEQ ID NO: 683, SEQ ID NO: 684, SEQ ID NO: 685, SEQ ID NO: 686, SEQ ID NO: 687, SEQ ID NO: 688, SEQ ID NO: 689, SEQ ID NO: 690, SEQ ID NO: 691, SEQ ID NO: 692, SEQ ID NO: 693, SEQ ID NO: 694, SEQ ID NO: 695, or SEQ ID NO: 696.

[0704] In some examples of any of the ABPCs described herein, the first antigen-binding domain includes a light chain variable domain comprising SEQ ID NO: 742, and a heavy chain variable domain comprising: SEQ ID NO: 502, SEQ ID NO: 510, SEQ ID NO: 511, SEQ ID NO: 512, SEQ ID NO: 513, SEQ ID NO: 514, SEQ ID NO: 515, SEQ ID NO: 516, SEQ ID NO: 517, SEQ ID NO: 518, SEQ ID NO: 519, SEQ ID NO: 520, SEQ ID NO: 521, SEQ ID NO: 522, SEQ ID NO: 523, SEQ ID NO: 524, SEQ ID NO: 525, SEQ ID NO: 526, SEQ ID NO: 527, SEQ ID NO: 528, SEQ ID NO: 529, SEQ ID NO: 530, SEQ ID NO: 531, SEQ ID NO: 532, SEQ ID NO: 533, SEQ ID NO: 534, SEQ ID NO: 535, SEQ ID NO: 536, SEQ ID NO: 537, SEQ ID NO: 538, SEQ ID NO: 539, SEQ ID NO: 540, SEQ ID NO: 541, SEQ ID NO: 542, SEQ ID NO: 543, SEQ ID NO: 544, SEQ ID NO: 545, SEQ ID NO: 546, SEQ ID NO: 547, SEQ ID NO: 548, SEQ ID NO: 577, SEQ ID NO: 578, SEQ ID NO: 579, SEQ ID NO: 580, SEQ ID NO: 581, SEQ ID NO: 582, SEQ ID NO: 583, SEQ ID NO: 584, SEQ ID NO: 585, SEQ ID NO: 586, SEQ ID NO: 587, SEQ ID NO: 588, SEQ ID NO: 589, SEQ ID NO: 590, SEQ ID NO: 591, SEQ ID NO: 592, SEQ ID NO: 593, SEQ ID NO: 594, SEQ ID NO: 595, SEQ ID NO: 596, SEQ ID NO: 597, SEQ ID NO: 598, SEQ ID NO: 599, SEQ ID NO: 600, SEQ ID NO: 601, SEQ ID NO: 602, SEQ ID NO: 603, SEQ ID NO: 604, SEQ ID NO: 605, SEQ ID NO: 606, SEQ ID NO: 607, SEQ ID NO: 608, SEQ ID NO: 609, SEQ ID NO: 610, SEQ ID NO: 611, SEQ ID NO: 612, SEQ ID NO: 613, SEQ ID NO: 614, SEQ ID NO: 615, SEQ ID NO: 616, SEQ ID NO: 617, SEQ ID NO: 618, SEQ ID NO: 619, SEQ ID NO: 620, SEQ ID NO: 621, SEQ ID NO: 622, SEQ ID NO: 623, SEQ ID NO: 624, SEQ ID NO: 625, SEQ ID NO: 626, SEQ ID NO: 627, SEQ ID NO: 628, SEQ ID NO: 629, SEQ ID NO: 630, SEQ ID NO: 631, SEQ ID NO: 632, SEQ ID NO: 633, SEQ ID NO: 634, SEQ ID NO: 635, SEQ ID NO: 636, SEQ ID NO: 637, SEQ ID NO: 638, SEQ ID NO: 639, SEQ ID NO: 640, SEQ ID NO: 641, SEQ ID NO: 642, SEQ ID NO: 643, SEQ ID NO: 644, SEQ ID NO: 645, SEQ ID NO: 646, SEQ ID NO: 647, SEQ ID NO: 648, SEQ ID NO: 649, SEQ ID NO: 650, SEQ ID NO: 651, SEQ ID NO: 652, SEQ ID NO: 653, SEQ ID NO: 654, SEQ ID NO: 655, SEQ ID NO: 656, SEQ ID NO: 657, SEQ ID NO: 658, SEQ ID NO: 659, SEQ ID NO: 660, SEQ ID NO: 661, SEQ ID NO: 662, SEQ ID NO: 663, SEQ ID NO: 664, SEQ ID NO: 665, SEQ ID NO: 666, SEQ ID NO: 667, SEQ ID NO: 668, SEQ ID NO: 669, SEQ ID NO: 670, SEQ ID NO: 671, SEQ ID NO: 672, SEQ ID NO: 673, SEQ ID NO: 674, SEQ ID NO: 675, SEQ ID NO: 676, SEQ ID NO: 677, SEQ ID NO: 678, SEQ ID NO: 679, SEQ ID NO: 680, SEQ ID NO: 681, SEQ ID NO: 682, SEQ ID NO: 683, SEQ ID NO: 684, SEQ ID NO: 685, SEQ ID NO: 686, SEQ ID NO: 687, SEQ ID NO: 688, SEQ ID NO: 689, SEQ ID NO: 690, SEQ ID NO: 691, SEQ ID NO: 692, SEQ ID NO: 693, SEQ ID NO: 694, SEQ ID NO: 695, or SEQ ID NO: 696.

[0705] In some examples of any of the ABPCs described herein, the first antigen-binding domain includes a light chain variable domain comprising SEQ ID NO: 743, and a heavy chain variable domain comprising: SEQ ID NO: 502, SEQ ID NO: 510, SEQ ID NO: 511, SEQ ID NO: 512, SEQ ID NO: 513, SEQ ID NO: 514, SEQ ID NO: 515, SEQ ID NO: 516, SEQ ID NO: 517, SEQ ID NO: 518, SEQ ID NO: 519, SEQ ID NO: 520, SEQ ID NO: 521, SEQ ID NO: 522, SEQ ID NO: 523, SEQ ID NO: 524, SEQ ID NO: 525, SEQ ID NO: 526, SEQ ID NO: 527, SEQ ID NO: 528, SEQ ID NO: 529, SEQ ID NO: 530, SEQ ID NO: 531, SEQ ID NO: 532, SEQ ID NO: 533, SEQ ID NO: 534, SEQ ID NO: 535, SEQ ID NO: 536, SEQ ID NO: 537, SEQ ID NO: 538, SEQ ID NO: 539, SEQ ID NO: 540, SEQ ID NO: 541, SEQ ID NO: 542, SEQ ID NO: 543, SEQ ID NO: 544, SEQ ID NO: 545, SEQ ID NO: 546, SEQ ID NO: 547, SEQ ID NO: 548, SEQ ID NO: 577, SEQ ID NO: 578, SEQ ID NO: 579, SEQ ID NO: 580, SEQ ID NO: 581, SEQ ID NO: 582, SEQ ID NO: 583, SEQ ID NO: 584, SEQ ID NO: 585, SEQ ID NO: 586, SEQ ID NO: 587, SEQ ID NO: 588, SEQ ID NO: 589, SEQ ID NO: 590, SEQ ID NO: 591, SEQ ID NO: 592, SEQ ID NO: 593, SEQ ID NO: 594, SEQ ID NO: 595, SEQ ID NO: 596, SEQ ID NO: 597, SEQ ID NO: 598, SEQ ID NO: 599, SEQ ID NO: 600, SEQ ID NO: 601, SEQ ID NO: 602, SEQ ID NO: 603, SEQ ID NO: 604, SEQ ID NO: 605, SEQ ID NO: 606, SEQ ID NO: 607, SEQ ID NO: 608, SEQ ID NO: 609, SEQ ID NO: 610, SEQ ID NO: 611, SEQ ID NO: 612, SEQ ID NO: 613, SEQ ID NO: 614, SEQ ID NO: 615, SEQ ID NO: 616, SEQ ID NO: 617, SEQ ID NO: 618, SEQ ID NO: 619, SEQ ID NO: 620, SEQ ID NO: 621, SEQ ID NO: 622, SEQ ID NO: 623, SEQ ID NO: 624, SEQ ID NO: 625, SEQ ID NO: 626, SEQ ID NO: 627, SEQ ID NO: 628, SEQ ID NO: 629, SEQ ID NO: 630, SEQ ID NO: 631, SEQ ID NO: 632, SEQ ID NO: 633, SEQ ID NO: 634, SEQ ID NO: 635, SEQ ID NO: 636, SEQ ID NO: 637, SEQ ID NO: 638, SEQ ID NO: 639, SEQ ID NO: 640, SEQ ID NO: 641, SEQ ID NO: 642, SEQ ID NO: 643, SEQ ID NO: 644, SEQ ID NO: 645, SEQ ID NO: 646, SEQ ID NO: 647, SEQ ID NO: 648, SEQ ID NO: 649, SEQ ID NO: 650, SEQ ID NO: 651, SEQ ID NO: 652, SEQ ID NO: 653, SEQ ID NO: 654, SEQ ID NO: 655, SEQ ID NO: 656, SEQ ID NO: 657, SEQ ID NO: 658, SEQ ID NO: 659, SEQ ID NO: 660, SEQ ID NO: 661, SEQ ID NO: 662, SEQ ID NO: 663, SEQ ID NO: 664, SEQ ID NO: 665, SEQ ID NO: 666, SEQ ID NO: 667, SEQ ID NO: 668, SEQ ID NO: 669, SEQ ID NO: 670, SEQ ID NO: 671, SEQ ID NO: 672, SEQ ID NO: 673, SEQ ID NO: 674, SEQ ID NO: 675, SEQ ID NO: 676, SEQ ID NO: 677, SEQ ID NO: 678, SEQ ID NO: 679, SEQ ID NO: 680, SEQ ID NO: 681, SEQ ID NO: 682, SEQ ID NO: 683, SEQ ID NO: 684, SEQ ID NO: 685, SEQ ID NO: 686, SEQ ID NO: 687, SEQ ID NO: 688, SEQ ID NO: 689, SEQ ID NO: 690, SEQ ID NO: 691, SEQ ID NO: 692, SEQ ID NO: 693, SEQ ID NO: 694, SEQ ID NO: 695, or SEQ ID NO: 696.

[0706] In some examples of any of the ABPCs described herein, the first antigen-binding domain includes a light chain variable domain comprising SEQ ID NO: 744, and a heavy chain variable domain comprising: SEQ ID NO: 502, SEQ ID NO: 510, SEQ ID NO: 511, SEQ ID NO: 512, SEQ ID NO: 513, SEQ ID NO: 514, SEQ ID NO: 515, SEQ ID NO: 516, SEQ ID NO: 517, SEQ ID NO: 518, SEQ ID NO: 519, SEQ ID NO: 520, SEQ ID NO: 521, SEQ ID NO: 522, SEQ ID NO: 523, SEQ ID NO: 524, SEQ ID NO: 525, SEQ ID NO: 526, SEQ ID NO: 527, SEQ ID NO: 528, SEQ ID NO: 529, SEQ ID NO: 530, SEQ ID NO: 531, SEQ ID NO: 532, SEQ ID NO: 533, SEQ ID NO: 534, SEQ ID NO: 535, SEQ ID NO: 536, SEQ ID NO: 537, SEQ ID NO: 538, SEQ ID NO: 539, SEQ ID NO: 540, SEQ ID NO: 541, SEQ ID NO: 542, SEQ ID NO: 543, SEQ ID NO: 544, SEQ ID NO: 545, SEQ ID NO: 546, SEQ ID NO: 547, SEQ ID NO: 548, SEQ ID NO: 577, SEQ ID NO: 578, SEQ ID NO: 579, SEQ ID NO: 580, SEQ ID NO: 581, SEQ ID NO: 582, SEQ ID NO: 583, SEQ ID NO: 584, SEQ ID NO: 585, SEQ ID NO: 586, SEQ ID NO: 587, SEQ ID NO: 588, SEQ ID NO: 589, SEQ ID NO: 590, SEQ ID NO: 591, SEQ ID NO: 592, SEQ ID NO: 593, SEQ ID NO: 594, SEQ ID NO: 595, SEQ ID NO: 596, SEQ ID NO: 597, SEQ ID NO: 598, SEQ ID NO: 599, SEQ ID NO: 600, SEQ ID NO: 601, SEQ ID NO: 602, SEQ ID NO: 603, SEQ ID NO: 604, SEQ ID NO: 605, SEQ ID NO: 606, SEQ ID NO: 607, SEQ ID NO: 608, SEQ ID NO: 609, SEQ ID NO: 610, SEQ ID NO: 611, SEQ ID NO: 612, SEQ ID NO: 613, SEQ ID NO: 614, SEQ ID NO: 615, SEQ ID NO: 616, SEQ ID NO: 617, SEQ ID NO: 618, SEQ ID NO: 619, SEQ ID NO: 620, SEQ ID NO: 621, SEQ ID NO: 622, SEQ ID NO: 623, SEQ ID NO: 624, SEQ ID NO: 625, SEQ ID NO: 626, SEQ ID NO: 627, SEQ ID NO: 628, SEQ ID NO: 629, SEQ ID NO: 630, SEQ ID NO: 631, SEQ ID NO: 632, SEQ ID NO: 633, SEQ ID NO: 634, SEQ ID NO: 635, SEQ ID NO: 636, SEQ ID NO: 637, SEQ ID NO: 638, SEQ ID NO: 639, SEQ ID NO: 640, SEQ ID NO: 641, SEQ ID NO: 642, SEQ ID NO: 643, SEQ ID NO: 644, SEQ ID NO: 645, SEQ ID NO: 646, SEQ ID NO: 647, SEQ ID NO: 648, SEQ ID NO: 649, SEQ ID NO: 650, SEQ ID NO: 651, SEQ ID NO: 652, SEQ ID NO: 653, SEQ ID NO: 654, SEQ ID NO: 655, SEQ ID NO: 656, SEQ ID NO: 657, SEQ ID NO: 658, SEQ ID NO: 659, SEQ ID NO: 660, SEQ ID NO: 661, SEQ ID NO: 662, SEQ ID NO: 663, SEQ ID NO: 664, SEQ ID NO: 665, SEQ ID NO: 666, SEQ ID NO: 667, SEQ ID NO: 668, SEQ ID NO: 669, SEQ ID NO: 670, SEQ ID NO: 671, SEQ ID NO: 672, SEQ ID NO: 673, SEQ ID NO: 674, SEQ ID NO: 675, SEQ ID NO: 676, SEQ ID NO: 677, SEQ ID NO: 678, SEQ ID NO: 679, SEQ ID NO: 680, SEQ ID NO: 681, SEQ ID NO: 682, SEQ ID NO: 683, SEQ ID NO: 684, SEQ ID NO: 685, SEQ ID NO: 686, SEQ ID NO: 687, SEQ ID NO: 688, SEQ ID NO: 689, SEQ ID NO: 690, SEQ ID NO: 691, SEQ ID NO: 692, SEQ ID NO: 693, SEQ ID NO: 694, SEQ ID NO: 695, or SEQ ID NO: 696.

[0707] In some examples of any of the ABPCs described herein, the first antigen-binding domain includes a light chain variable domain comprising SEQ ID NO: 745, and a heavy chain variable domain comprising: SEQ ID NO: 502, SEQ ID NO: 510, SEQ ID NO: 511, SEQ ID NO: 512, SEQ ID NO: 513, SEQ ID NO: 514, SEQ ID NO: 515, SEQ ID NO: 516, SEQ ID NO: 517, SEQ ID NO: 518, SEQ ID NO: 519, SEQ ID NO: 520, SEQ ID NO: 521, SEQ ID NO: 522, SEQ ID NO: 523, SEQ ID NO: 524, SEQ ID NO: 525, SEQ ID NO: 526, SEQ ID NO: 527, SEQ ID NO: 528, SEQ ID NO: 529, SEQ ID NO: 530, SEQ ID NO: 531, SEQ ID NO: 532, SEQ ID NO: 533, SEQ ID NO: 534, SEQ ID NO: 535, SEQ ID NO: 536, SEQ ID NO: 537, SEQ ID NO: 538, SEQ ID NO: 539, SEQ ID NO: 540, SEQ ID NO: 541, SEQ ID NO: 542, SEQ ID NO: 543, SEQ ID NO: 544, SEQ ID NO: 545, SEQ ID NO: 546, SEQ ID NO: 547, SEQ ID NO: 548, SEQ ID NO: 577, SEQ ID NO: 578, SEQ ID NO: 579, SEQ ID NO: 580, SEQ ID NO: 581, SEQ ID NO: 582, SEQ ID NO: 583, SEQ ID NO: 584, SEQ ID NO: 585, SEQ ID NO: 586, SEQ ID NO: 587, SEQ ID NO: 588, SEQ ID NO: 589, SEQ ID NO: 590, SEQ ID NO: 591, SEQ ID NO: 592, SEQ ID NO: 593, SEQ ID NO: 594, SEQ ID NO: 595, SEQ ID NO: 596, SEQ ID NO: 597, SEQ ID NO: 598, SEQ ID NO: 599, SEQ ID NO: 600, SEQ ID NO: 601, SEQ ID NO: 602, SEQ ID NO: 603, SEQ ID NO: 604, SEQ ID NO: 605, SEQ ID NO: 606, SEQ ID NO: 607, SEQ ID NO: 608, SEQ ID NO: 609, SEQ ID NO: 610, SEQ ID NO: 611, SEQ ID NO: 612, SEQ ID NO: 613, SEQ ID NO: 614, SEQ ID NO: 615, SEQ ID NO: 616, SEQ ID NO: 617, SEQ ID NO: 618, SEQ ID NO: 619, SEQ ID NO: 620, SEQ ID NO: 621, SEQ ID NO: 622, SEQ ID NO: 623, SEQ ID NO: 624, SEQ ID NO: 625, SEQ ID NO: 626, SEQ ID NO: 627, SEQ ID NO: 628, SEQ ID NO: 629, SEQ ID NO: 630, SEQ ID NO: 631, SEQ ID NO: 632, SEQ ID NO: 633, SEQ ID NO: 634, SEQ ID NO: 635, SEQ ID NO: 636, SEQ ID NO: 637, SEQ ID NO: 638, SEQ ID NO: 639, SEQ ID NO: 640, SEQ ID NO: 641, SEQ ID NO: 642, SEQ ID NO: 643, SEQ ID NO: 644, SEQ ID NO: 645, SEQ ID NO: 646, SEQ ID NO: 647, SEQ ID NO: 648, SEQ ID NO: 649, SEQ ID NO: 650, SEQ ID NO: 651, SEQ ID NO: 652, SEQ ID NO: 653, SEQ ID NO: 654, SEQ ID NO: 655, SEQ ID NO: 656, SEQ ID NO: 657, SEQ ID NO: 658, SEQ ID NO: 659, SEQ ID NO: 660, SEQ ID NO: 661, SEQ ID NO: 662, SEQ ID NO: 663, SEQ ID NO: 664, SEQ ID NO: 665, SEQ ID NO: 666, SEQ ID NO: 667, SEQ ID NO: 668, SEQ ID NO: 669, SEQ ID NO: 670, SEQ ID NO: 671, SEQ ID NO: 672, SEQ ID NO: 673, SEQ ID NO: 674, SEQ ID NO: 675, SEQ ID NO: 676, SEQ ID NO: 677, SEQ ID NO: 678, SEQ ID NO: 679, SEQ ID NO: 680, SEQ ID NO: 681, SEQ ID NO: 682, SEQ ID NO: 683, SEQ ID NO: 684, SEQ ID NO: 685, SEQ ID NO: 686, SEQ ID NO: 687, SEQ ID NO: 688, SEQ ID NO: 689, SEQ ID NO: 690, SEQ ID NO: 691, SEQ ID NO: 692, SEQ ID NO: 693, SEQ ID NO: 694, SEQ ID NO: 695, or SEQ ID NO: 696.

[0708] In some examples of any of the ABPCs described herein, the first antigen-binding domain includes a light chain variable domain comprising SEQ ID NO: 746, and a heavy chain variable domain comprising: SEQ ID NO: 502, SEQ ID NO: 510, SEQ ID NO: 511, SEQ ID NO: 512, SEQ ID NO: 513, SEQ ID NO: 514, SEQ ID NO: 515, SEQ ID NO: 516, SEQ ID NO: 517, SEQ ID NO: 518, SEQ ID NO: 519, SEQ ID NO: 520, SEQ ID NO: 521, SEQ ID NO: 522, SEQ ID NO: 523, SEQ ID NO: 524, SEQ ID NO: 525, SEQ ID NO: 526, SEQ ID NO: 527, SEQ ID NO: 528, SEQ ID NO: 529, SEQ ID NO: 530, SEQ ID NO: 531, SEQ ID NO: 532, SEQ ID NO: 533, SEQ ID NO: 534, SEQ ID NO: 535, SEQ ID NO: 536, SEQ ID NO: 537, SEQ ID NO: 538, SEQ ID NO: 539, SEQ ID NO: 540, SEQ ID NO: 541, SEQ ID NO: 542, SEQ ID NO: 543, SEQ ID NO: 544, SEQ ID NO: 545, SEQ ID NO: 546, SEQ ID NO: 547, SEQ ID NO: 548, SEQ ID NO: 577, SEQ ID NO: 578, SEQ ID NO: 579, SEQ ID NO: 580, SEQ ID NO: 581, SEQ ID NO: 582, SEQ ID NO: 583, SEQ ID NO: 584, SEQ ID NO: 585, SEQ ID NO: 586, SEQ ID NO: 587, SEQ ID NO: 588, SEQ ID NO: 589, SEQ ID NO: 590, SEQ ID NO: 591, SEQ ID NO: 592, SEQ ID NO: 593, SEQ ID NO: 594, SEQ ID NO: 595, SEQ ID NO: 596, SEQ ID NO: 597, SEQ ID NO: 598, SEQ ID NO: 599, SEQ ID NO: 600, SEQ ID NO: 601, SEQ ID NO: 602, SEQ ID NO: 603, SEQ ID NO: 604, SEQ ID NO: 605, SEQ ID NO: 606, SEQ ID NO: 607, SEQ ID NO: 608, SEQ ID NO: 609, SEQ ID NO: 610, SEQ ID NO: 611, SEQ ID NO: 612, SEQ ID NO: 613, SEQ ID NO: 614, SEQ ID NO: 615, SEQ ID NO: 616, SEQ ID NO: 617, SEQ ID NO: 618, SEQ ID NO: 619, SEQ ID NO: 620, SEQ ID NO: 621, SEQ ID NO: 622, SEQ ID NO: 623, SEQ ID NO: 624, SEQ ID NO: 625, SEQ ID NO: 626, SEQ ID NO: 627, SEQ ID NO: 628, SEQ ID NO: 629, SEQ ID NO: 630, SEQ ID NO: 631, SEQ ID NO: 632, SEQ ID NO: 633, SEQ ID NO: 634, SEQ ID NO: 635, SEQ ID NO: 636, SEQ ID NO: 637, SEQ ID NO: 638, SEQ ID NO: 639, SEQ ID NO: 640, SEQ ID NO: 641, SEQ ID NO: 642, SEQ ID NO: 643, SEQ ID NO: 644, SEQ ID NO: 645, SEQ ID NO: 646, SEQ ID NO: 647, SEQ ID NO: 648, SEQ ID NO: 649, SEQ ID NO: 650, SEQ ID NO: 651, SEQ ID NO: 652, SEQ ID NO: 653, SEQ ID NO: 654, SEQ ID NO: 655, SEQ ID NO: 656, SEQ ID NO: 657, SEQ ID NO: 658, SEQ ID NO: 659, SEQ ID NO: 660, SEQ ID NO: 661, SEQ ID NO: 662, SEQ ID NO: 663, SEQ ID NO: 664, SEQ ID NO: 665, SEQ ID NO: 666, SEQ ID NO: 667, SEQ ID NO: 668, SEQ ID NO: 669, SEQ ID NO: 670, SEQ ID NO: 671, SEQ ID NO: 672, SEQ ID NO: 673, SEQ ID NO: 674, SEQ ID NO: 675, SEQ ID NO: 676, SEQ ID NO: 677, SEQ ID NO: 678, SEQ ID NO: 679, SEQ ID NO: 680, SEQ ID NO: 681, SEQ ID NO: 682, SEQ ID NO: 683, SEQ ID NO: 684, SEQ ID NO: 685, SEQ ID NO: 686, SEQ ID NO: 687, SEQ ID NO: 688, SEQ ID NO: 689, SEQ ID NO: 690, SEQ ID NO: 691, SEQ ID NO: 692, SEQ ID NO: 693, SEQ ID NO: 694, SEQ ID NO: 695, or SEQ ID NO: 696.

[0709] In some examples of any of the ABPCs described herein, the first antigen-binding domain includes a light chain variable domain comprising SEQ ID NO: 747, and a heavy chain variable domain comprising: SEQ ID NO: 502, SEQ ID NO: 510, SEQ ID NO: 511, SEQ ID NO: 512, SEQ ID NO: 513, SEQ ID NO: 514, SEQ ID NO: 515, SEQ ID NO: 516, SEQ ID NO: 517, SEQ ID NO: 518, SEQ ID NO: 519, SEQ ID NO: 520, SEQ ID NO: 521, SEQ ID NO: 522, SEQ ID NO: 523, SEQ ID NO: 524, SEQ ID NO: 525, SEQ ID NO: 526, SEQ ID NO: 527, SEQ ID NO: 528, SEQ ID NO: 529, SEQ ID NO: 530, SEQ ID NO: 531, SEQ ID NO: 532, SEQ ID NO: 533, SEQ ID NO: 534, SEQ ID NO: 535, SEQ ID NO: 536, SEQ ID NO: 537, SEQ ID NO: 538, SEQ ID NO: 539, SEQ ID NO: 540, SEQ ID NO: 541, SEQ ID NO: 542, SEQ ID NO: 543, SEQ ID NO: 544, SEQ ID NO: 545, SEQ ID NO: 546, SEQ ID NO: 547, SEQ ID NO: 548, SEQ ID NO: 577, SEQ ID NO: 578, SEQ ID NO: 579, SEQ ID NO: 580, SEQ ID NO: 581, SEQ ID NO: 582, SEQ ID NO: 583, SEQ ID NO: 584, SEQ ID NO: 585, SEQ ID NO: 586, SEQ ID NO: 587, SEQ ID NO: 588, SEQ ID NO: 589, SEQ ID NO: 590, SEQ ID NO: 591, SEQ ID NO: 592, SEQ ID NO: 593, SEQ ID NO: 594, SEQ ID NO: 595, SEQ ID NO: 596, SEQ ID NO: 597, SEQ ID NO: 598, SEQ ID NO: 599, SEQ ID NO: 600, SEQ ID NO: 601, SEQ ID NO: 602, SEQ ID NO: 603, SEQ ID NO: 604, SEQ ID NO: 605, SEQ ID NO: 606, SEQ ID NO: 607, SEQ ID NO: 608, SEQ ID NO: 609, SEQ ID NO: 610, SEQ ID NO: 611, SEQ ID NO: 612, SEQ ID NO: 613, SEQ ID NO: 614, SEQ ID NO: 615, SEQ ID NO: 616, SEQ ID NO: 617, SEQ ID NO: 618, SEQ ID NO: 619, SEQ ID NO: 620, SEQ ID NO: 621, SEQ ID NO: 622, SEQ ID NO: 623, SEQ ID NO: 624, SEQ ID NO: 625, SEQ ID NO: 626, SEQ ID NO: 627, SEQ ID NO: 628, SEQ ID NO: 629, SEQ ID NO: 630, SEQ ID NO: 631, SEQ ID NO: 632, SEQ ID NO: 633, SEQ ID NO: 634, SEQ ID NO: 635, SEQ ID NO: 636, SEQ ID NO: 637, SEQ ID NO: 638, SEQ ID NO: 639, SEQ ID NO: 640, SEQ ID NO: 641, SEQ ID NO: 642, SEQ ID NO: 643, SEQ ID NO: 644, SEQ ID NO: 645, SEQ ID NO: 646, SEQ ID NO: 647, SEQ ID NO: 648, SEQ ID NO: 649, SEQ ID NO: 650, SEQ ID NO: 651, SEQ ID NO: 652, SEQ ID NO: 653, SEQ ID NO: 654, SEQ ID NO: 655, SEQ ID NO: 656, SEQ ID NO: 657, SEQ ID NO: 658, SEQ ID NO: 659, SEQ ID NO: 660, SEQ ID NO: 661, SEQ ID NO: 662, SEQ ID NO: 663, SEQ ID NO: 664, SEQ ID NO: 665, SEQ ID NO: 666, SEQ ID NO: 667, SEQ ID NO: 668, SEQ ID NO: 669, SEQ ID NO: 670, SEQ ID NO: 671, SEQ ID NO: 672, SEQ ID NO: 673, SEQ ID NO: 674, SEQ ID NO: 675, SEQ ID NO: 676, SEQ ID NO: 677, SEQ ID NO: 678, SEQ ID NO: 679, SEQ ID NO: 680, SEQ ID NO: 681, SEQ ID NO: 682, SEQ ID NO: 683, SEQ ID NO: 684, SEQ ID NO: 685, SEQ ID NO: 686, SEQ ID NO: 687, SEQ ID NO: 688, SEQ ID NO: 689, SEQ ID NO: 690, SEQ ID NO: 691, SEQ ID NO: 692, SEQ ID NO: 693, SEQ ID NO: 694, SEQ ID NO: 695, or SEQ ID NO: 696.

[0710] In some examples of any of the ABPCs described herein, the first antigen-binding domain includes a light chain variable domain comprising SEQ ID NO: 748, and a heavy chain variable domain comprising: SEQ ID NO: 502, SEQ ID NO: 510, SEQ ID NO: 511, SEQ ID NO: 512, SEQ ID NO: 513, SEQ ID NO: 514, SEQ ID NO: 515, SEQ ID NO: 516, SEQ ID NO: 517, SEQ ID NO: 518, SEQ ID NO: 519, SEQ ID NO: 520, SEQ ID NO: 521, SEQ ID NO: 522, SEQ ID NO: 523, SEQ ID NO: 524, SEQ ID NO: 525, SEQ ID NO: 526, SEQ ID NO: 527, SEQ ID NO: 528, SEQ ID NO: 529, SEQ ID NO: 530, SEQ ID NO: 531, SEQ ID NO: 532, SEQ ID NO: 533, SEQ ID NO: 534, SEQ ID NO: 535, SEQ ID NO: 536, SEQ ID NO: 537, SEQ ID NO: 538, SEQ ID NO: 539, SEQ ID NO: 540, SEQ ID NO: 541, SEQ ID NO: 542, SEQ ID NO: 543, SEQ ID NO: 544, SEQ ID NO: 545, SEQ ID NO: 546, SEQ ID NO: 547, SEQ ID NO: 548, SEQ ID NO: 577, SEQ ID NO: 578, SEQ ID NO: 579, SEQ ID NO: 580, SEQ ID NO: 581, SEQ ID NO: 582, SEQ ID NO: 583, SEQ ID NO: 584, SEQ ID NO: 585, SEQ ID NO: 586, SEQ ID NO: 587, SEQ ID NO: 588, SEQ ID NO: 589, SEQ ID NO: 590, SEQ ID NO: 591, SEQ ID NO: 592, SEQ ID NO: 593, SEQ ID NO: 594, SEQ ID NO: 595, SEQ ID NO: 596, SEQ ID NO: 597, SEQ ID NO: 598, SEQ ID NO: 599, SEQ ID NO: 600, SEQ ID NO: 601, SEQ ID NO: 602, SEQ ID NO: 603, SEQ ID NO: 604, SEQ ID NO: 605, SEQ ID NO: 606, SEQ ID NO: 607, SEQ ID NO: 608, SEQ ID NO: 609, SEQ ID NO: 610, SEQ ID NO: 611, SEQ ID NO: 612, SEQ ID NO: 613, SEQ ID NO: 614, SEQ ID NO: 615, SEQ ID NO: 616, SEQ ID NO: 617, SEQ ID NO: 618, SEQ ID NO: 619, SEQ ID NO: 620, SEQ ID NO: 621, SEQ ID NO: 622, SEQ ID NO: 623, SEQ ID NO: 624, SEQ ID NO: 625, SEQ ID NO: 626, SEQ ID NO: 627, SEQ ID NO: 628, SEQ ID NO: 629, SEQ ID NO: 630, SEQ ID NO: 631, SEQ ID NO: 632, SEQ ID NO: 633, SEQ ID NO: 634, SEQ ID NO: 635, SEQ ID NO: 636, SEQ ID NO: 637, SEQ ID NO: 638, SEQ ID NO: 639, SEQ ID NO: 640, SEQ ID NO: 641, SEQ ID NO: 642, SEQ ID NO: 643, SEQ ID NO: 644, SEQ ID NO: 645, SEQ ID NO: 646, SEQ ID NO: 647, SEQ ID NO: 648, SEQ ID NO: 649, SEQ ID NO: 650, SEQ ID NO: 651, SEQ ID NO: 652, SEQ ID NO: 653, SEQ ID NO: 654, SEQ ID NO: 655, SEQ ID NO: 656, SEQ ID NO: 657, SEQ ID NO: 658, SEQ ID NO: 659, SEQ ID NO: 660, SEQ ID NO: 661, SEQ ID NO: 662, SEQ ID NO: 663, SEQ ID NO: 664, SEQ ID NO: 665, SEQ ID NO: 666, SEQ ID NO: 667, SEQ ID NO: 668, SEQ ID NO: 669, SEQ ID NO: 670, SEQ ID NO: 671, SEQ ID NO: 672, SEQ ID NO: 673, SEQ ID NO: 674, SEQ ID NO: 675, SEQ ID NO: 676, SEQ ID NO: 677, SEQ ID NO: 678, SEQ ID NO: 679, SEQ ID NO: 680, SEQ ID NO: 681, SEQ ID NO: 682, SEQ ID NO: 683, SEQ ID NO: 684, SEQ ID NO: 685, SEQ ID NO: 686, SEQ ID NO: 687, SEQ ID NO: 688, SEQ ID NO: 689, SEQ ID NO: 690, SEQ ID NO: 691, SEQ ID NO: 692, SEQ ID NO: 693, SEQ ID NO: 694, SEQ ID NO: 695, or SEQ ID NO: 696.

[0711] In some examples of any of the ABPCs described herein, the first antigen-binding domain includes a light chain variable domain comprising SEQ ID NO: 749, and a heavy chain variable domain comprising: SEQ ID NO: 502, SEQ ID NO: 510, SEQ ID NO: 511, SEQ ID NO: 512, SEQ ID NO: 513, SEQ ID NO: 514, SEQ ID NO: 515, SEQ ID NO: 516, SEQ ID NO: 517, SEQ ID NO: 518, SEQ ID NO: 519, SEQ ID NO: 520, SEQ ID NO: 521, SEQ ID NO: 522, SEQ ID NO: 523, SEQ ID NO: 524, SEQ ID NO: 525, SEQ ID NO: 526, SEQ ID NO: 527, SEQ ID NO: 528, SEQ ID NO: 529, SEQ ID NO: 530, SEQ ID NO: 531, SEQ ID NO: 532, SEQ ID NO: 533, SEQ ID NO: 534, SEQ ID NO: 535, SEQ ID NO: 536, SEQ ID NO: 537, SEQ ID NO: 538, SEQ ID NO: 539, SEQ ID NO: 540, SEQ ID NO: 541, SEQ ID NO: 542, SEQ ID NO: 543, SEQ ID NO: 544, SEQ ID NO: 545, SEQ ID NO: 546, SEQ ID NO: 547, SEQ ID NO: 548, SEQ ID NO: 577, SEQ ID NO: 578, SEQ ID NO: 579, SEQ ID NO: 580, SEQ ID NO: 581, SEQ ID NO: 582, SEQ ID NO: 583, SEQ ID NO: 584, SEQ ID NO: 585, SEQ ID NO: 586, SEQ ID NO: 587, SEQ ID NO: 588, SEQ ID NO: 589, SEQ ID NO: 590, SEQ ID NO: 591, SEQ ID NO: 592, SEQ ID NO: 593, SEQ ID NO: 594, SEQ ID NO: 595, SEQ ID NO: 596, SEQ ID NO: 597, SEQ ID NO: 598, SEQ ID NO: 599, SEQ ID NO: 600, SEQ ID NO: 601, SEQ ID NO: 602, SEQ ID NO: 603, SEQ ID NO: 604, SEQ ID NO: 605, SEQ ID NO: 606, SEQ ID NO: 607, SEQ ID NO: 608, SEQ ID NO: 609, SEQ ID NO: 610, SEQ ID NO: 611, SEQ ID NO: 612, SEQ ID NO: 613, SEQ ID NO: 614, SEQ ID NO: 615, SEQ ID NO: 616, SEQ ID NO: 617, SEQ ID NO: 618, SEQ ID NO: 619, SEQ ID NO: 620, SEQ ID NO: 621, SEQ ID NO: 622, SEQ ID NO: 623, SEQ ID NO: 624, SEQ ID NO: 625, SEQ ID NO: 626, SEQ ID NO: 627, SEQ ID NO: 628, SEQ ID NO: 629, SEQ ID NO: 630, SEQ ID NO: 631, SEQ ID NO: 632, SEQ ID NO: 633, SEQ ID NO: 634, SEQ ID NO: 635, SEQ ID NO: 636, SEQ ID NO: 637, SEQ ID NO: 638, SEQ ID NO: 639, SEQ ID NO: 640, SEQ ID NO: 641, SEQ ID NO: 642, SEQ ID NO: 643, SEQ ID NO: 644, SEQ ID NO: 645, SEQ ID NO: 646, SEQ ID NO: 647, SEQ ID NO: 648, SEQ ID NO: 649, SEQ ID NO: 650, SEQ ID NO: 651, SEQ ID NO: 652, SEQ ID NO: 653, SEQ ID NO: 654, SEQ ID NO: 655, SEQ ID NO: 656, SEQ ID NO: 657, SEQ ID NO: 658, SEQ ID NO: 659, SEQ ID NO: 660, SEQ ID NO: 661, SEQ ID NO: 662, SEQ ID NO: 663, SEQ ID NO: 664, SEQ ID NO: 665, SEQ ID NO: 666, SEQ ID NO: 667, SEQ ID NO: 668, SEQ ID NO: 669, SEQ ID NO: 670, SEQ ID NO: 671, SEQ ID NO: 672, SEQ ID NO: 673, SEQ ID NO: 674, SEQ ID NO: 675, SEQ ID NO: 676, SEQ ID NO: 677, SEQ ID NO: 678, SEQ ID NO: 679, SEQ ID NO: 680, SEQ ID NO: 681, SEQ ID NO: 682, SEQ ID NO: 683, SEQ ID NO: 684, SEQ ID NO: 685, SEQ ID NO: 686, SEQ ID NO: 687, SEQ ID NO: 688, SEQ ID NO: 689, SEQ ID NO: 690, SEQ ID NO: 691, SEQ ID NO: 692, SEQ ID NO: 693, SEQ ID NO: 694, SEQ ID NO: 695, or SEQ ID NO: 696.

[0712] In some examples of any of the ABPCs described herein, the first antigen-binding domain includes a light chain variable domain comprising SEQ ID NO: 750, and a heavy chain variable domain comprising: SEQ ID NO: 502, SEQ ID NO: 510, SEQ ID NO: 511, SEQ ID NO: 512, SEQ ID NO: 513, SEQ ID NO: 514, SEQ ID NO: 515, SEQ ID NO: 516, SEQ ID NO: 517, SEQ ID NO: 518, SEQ ID NO: 519, SEQ ID NO: 520, SEQ ID NO: 521, SEQ ID NO: 522, SEQ ID NO: 523, SEQ ID NO: 524, SEQ ID NO: 525, SEQ ID NO: 526, SEQ ID NO: 527, SEQ ID NO: 528, SEQ ID NO: 529, SEQ ID NO: 530, SEQ ID NO: 531, SEQ ID NO: 532, SEQ ID NO: 533, SEQ ID NO: 534, SEQ ID NO: 535, SEQ ID NO: 536, SEQ ID NO: 537, SEQ ID NO: 538, SEQ ID NO: 539, SEQ ID NO: 540, SEQ ID NO: 541, SEQ ID NO: 542, SEQ ID NO: 543, SEQ ID NO: 544, SEQ ID NO: 545, SEQ ID NO: 546, SEQ ID NO: 547, SEQ ID NO: 548, SEQ ID NO: 577, SEQ ID NO: 578, SEQ ID NO: 579, SEQ ID NO: 580, SEQ ID NO: 581, SEQ ID NO: 582, SEQ ID NO: 583, SEQ ID NO: 584, SEQ ID NO: 585, SEQ ID NO: 586, SEQ ID NO: 587, SEQ ID NO: 588, SEQ ID NO: 589, SEQ ID NO: 590, SEQ ID NO: 591, SEQ ID NO: 592, SEQ ID NO: 593, SEQ ID NO: 594, SEQ ID NO: 595, SEQ ID NO: 596, SEQ ID NO: 597, SEQ ID NO: 598, SEQ ID NO: 599, SEQ ID NO: 600, SEQ ID NO: 601, SEQ ID NO: 602, SEQ ID NO: 603, SEQ ID NO: 604, SEQ ID NO: 605, SEQ ID NO: 606, SEQ ID NO: 607, SEQ ID NO: 608, SEQ ID NO: 609, SEQ ID NO: 610, SEQ ID NO: 611, SEQ ID NO: 612, SEQ ID NO: 613, SEQ ID NO: 614, SEQ ID NO: 615, SEQ ID NO: 616, SEQ ID NO: 617, SEQ ID NO: 618, SEQ ID NO: 619, SEQ ID NO: 620, SEQ ID NO: 621, SEQ ID NO: 622, SEQ ID NO: 623, SEQ ID NO: 624, SEQ ID NO: 625, SEQ ID NO: 626, SEQ ID NO: 627, SEQ ID NO: 628, SEQ ID NO: 629, SEQ ID NO: 630, SEQ ID NO: 631, SEQ ID NO: 632, SEQ ID NO: 633, SEQ ID NO: 634, SEQ ID NO: 635, SEQ ID NO: 636, SEQ ID NO: 637, SEQ ID NO: 638, SEQ ID NO: 639, SEQ ID NO: 640, SEQ ID NO: 641, SEQ ID NO: 642, SEQ ID NO: 643, SEQ ID NO: 644, SEQ ID NO: 645, SEQ ID NO: 646, SEQ ID NO: 647, SEQ ID NO: 648, SEQ ID NO: 649, SEQ ID NO: 650, SEQ ID NO: 651, SEQ ID NO: 652, SEQ ID NO: 653, SEQ ID NO: 654, SEQ ID NO: 655, SEQ ID NO: 656, SEQ ID NO: 657, SEQ ID NO: 658, SEQ ID NO: 659, SEQ ID NO: 660, SEQ ID NO: 661, SEQ ID NO: 662, SEQ ID NO: 663, SEQ ID NO: 664, SEQ ID NO: 665, SEQ ID NO: 666, SEQ ID NO: 667, SEQ ID NO: 668, SEQ ID NO: 669, SEQ ID NO: 670, SEQ ID NO: 671, SEQ ID NO: 672, SEQ ID NO: 673, SEQ ID NO: 674, SEQ ID NO: 675, SEQ ID NO: 676, SEQ ID NO: 677, SEQ ID NO: 678, SEQ ID NO: 679, SEQ ID NO: 680, SEQ ID NO: 681, SEQ ID NO: 682, SEQ ID NO: 683, SEQ ID NO: 684, SEQ ID NO: 685, SEQ ID NO: 686, SEQ ID NO: 687, SEQ ID NO: 688, SEQ ID NO: 689, SEQ ID NO: 690, SEQ ID NO: 691, SEQ ID NO: 692, SEQ ID NO: 693, SEQ ID NO: 694, SEQ ID NO: 695, or SEQ ID NO: 696.

[0713] In some examples of any of the ABPCs described herein, the first antigen-binding domain includes a light chain variable domain comprising SEQ ID NO: 751, and a heavy chain variable domain comprising: SEQ ID NO: 502, SEQ ID NO: 510, SEQ ID NO: 511, SEQ ID NO: 512, SEQ ID NO: 513, SEQ ID NO: 514, SEQ ID NO: 515, SEQ ID NO: 516, SEQ ID NO: 517, SEQ ID NO: 518, SEQ ID NO: 519, SEQ ID NO: 520, SEQ ID NO: 521, SEQ ID NO: 522, SEQ ID NO: 523, SEQ ID NO: 524, SEQ ID NO: 525, SEQ ID NO: 526, SEQ ID NO: 527, SEQ ID NO: 528, SEQ ID NO: 529, SEQ ID NO: 530, SEQ ID NO: 531, SEQ ID NO: 532, SEQ ID NO: 533, SEQ ID NO: 534, SEQ ID NO: 535, SEQ ID NO: 536, SEQ ID NO: 537, SEQ ID NO: 538, SEQ ID NO: 539, SEQ ID NO: 540, SEQ ID NO: 541, SEQ ID NO: 542, SEQ ID NO: 543, SEQ ID NO: 544, SEQ ID NO: 545, SEQ ID NO: 546, SEQ ID NO: 547, SEQ ID NO: 548, SEQ ID NO: 577, SEQ ID NO: 578, SEQ ID NO: 579, SEQ ID NO: 580, SEQ ID NO: 581, SEQ ID NO: 582, SEQ ID NO: 583, SEQ ID NO: 584, SEQ ID NO: 585, SEQ ID NO: 586, SEQ ID NO: 587, SEQ ID NO: 588, SEQ ID NO: 589, SEQ ID NO: 590, SEQ ID NO: 591, SEQ ID NO: 592, SEQ ID NO: 593, SEQ ID NO: 594, SEQ ID NO: 595, SEQ ID NO: 596, SEQ ID NO: 597, SEQ ID NO: 598, SEQ ID NO: 599, SEQ ID NO: 600, SEQ ID NO: 601, SEQ ID NO: 602, SEQ ID NO: 603, SEQ ID NO: 604, SEQ ID NO: 605, SEQ ID NO: 606, SEQ ID NO: 607, SEQ ID NO: 608, SEQ ID NO: 609, SEQ ID NO: 610, SEQ ID NO: 611, SEQ ID NO: 612, SEQ ID NO: 613, SEQ ID NO: 614, SEQ ID NO: 615, SEQ ID NO: 616, SEQ ID NO: 617, SEQ ID NO: 618, SEQ ID NO: 619, SEQ ID NO: 620, SEQ ID NO: 621, SEQ ID NO: 622, SEQ ID NO: 623, SEQ ID NO: 624, SEQ ID NO: 625, SEQ ID NO: 626, SEQ ID NO: 627, SEQ ID NO: 628, SEQ ID NO: 629, SEQ ID NO: 630, SEQ ID NO: 631, SEQ ID NO: 632, SEQ ID NO: 633, SEQ ID NO: 634, SEQ ID NO: 635, SEQ ID NO: 636, SEQ ID NO: 637, SEQ ID NO: 638, SEQ ID NO: 639, SEQ ID NO: 640, SEQ ID NO: 641, SEQ ID NO: 642, SEQ ID NO: 643, SEQ ID NO: 644, SEQ ID NO: 645, SEQ ID NO: 646, SEQ ID NO: 647, SEQ ID NO: 648, SEQ ID NO: 649, SEQ ID NO: 650, SEQ ID NO: 651, SEQ ID NO: 652, SEQ ID NO: 653, SEQ ID NO: 654, SEQ ID NO: 655, SEQ ID NO: 656, SEQ ID NO: 657, SEQ ID NO: 658, SEQ ID NO: 659, SEQ ID NO: 660, SEQ ID NO: 661, SEQ ID NO: 662, SEQ ID NO: 663, SEQ ID NO: 664, SEQ ID NO: 665, SEQ ID NO: 666, SEQ ID NO: 667, SEQ ID NO: 668, SEQ ID NO: 669, SEQ ID NO: 670, SEQ ID NO: 671, SEQ ID NO: 672, SEQ ID NO: 673, SEQ ID NO: 674, SEQ ID NO: 675, SEQ ID NO: 676, SEQ ID NO: 677, SEQ ID NO: 678, SEQ ID NO: 679, SEQ ID NO: 680, SEQ ID NO: 681, SEQ ID NO: 682, SEQ ID NO: 683, SEQ ID NO: 684, SEQ ID NO: 685, SEQ ID NO: 686, SEQ ID NO: 687, SEQ ID NO: 688, SEQ ID NO: 689, SEQ ID NO: 690, SEQ ID NO: 691, SEQ ID NO: 692, SEQ ID NO: 693, SEQ ID NO: 694, SEQ ID NO: 695, or SEQ ID NO: 696.

[0714] In some examples of any of the ABPCs described herein, the first antigen-binding domain includes a light chain variable domain comprising SEQ ID NO: 752, and a heavy chain variable domain comprising: SEQ ID NO: 502, SEQ ID NO: 510, SEQ ID NO: 511, SEQ ID NO: 512, SEQ ID NO: 513, SEQ ID NO: 514, SEQ ID NO: 515, SEQ ID NO: 516, SEQ ID NO: 517, SEQ ID NO: 518, SEQ ID NO: 519, SEQ ID NO: 520, SEQ ID NO: 521, SEQ ID NO: 522, SEQ ID NO: 523, SEQ ID NO: 524, SEQ ID NO: 525, SEQ ID NO: 526, SEQ ID NO: 527, SEQ ID NO: 528, SEQ ID NO: 529, SEQ ID NO: 530, SEQ ID NO: 531, SEQ ID NO: 532, SEQ ID NO: 533, SEQ ID NO: 534, SEQ ID NO: 535, SEQ ID NO: 536, SEQ ID NO: 537, SEQ ID NO: 538, SEQ ID NO: 539, SEQ ID NO: 540, SEQ ID NO: 541, SEQ ID NO: 542, SEQ ID NO: 543, SEQ ID NO: 544, SEQ ID NO: 545, SEQ ID NO: 546, SEQ ID NO: 547, SEQ ID NO: 548, SEQ ID NO: 577, SEQ ID NO: 578, SEQ ID NO: 579, SEQ ID NO: 580, SEQ ID NO: 581, SEQ ID NO: 582, SEQ ID NO: 583, SEQ ID NO: 584, SEQ ID NO: 585, SEQ ID NO: 586, SEQ ID NO: 587, SEQ ID NO: 588, SEQ ID NO: 589, SEQ ID NO: 590, SEQ ID NO: 591, SEQ ID NO: 592, SEQ ID NO: 593, SEQ ID NO: 594, SEQ ID NO: 595, SEQ ID NO: 596, SEQ ID NO: 597, SEQ ID NO: 598, SEQ ID NO: 599, SEQ ID NO: 600, SEQ ID NO: 601, SEQ ID NO: 602, SEQ ID NO: 603, SEQ ID NO: 604, SEQ ID NO: 605, SEQ ID NO: 606, SEQ ID NO: 607, SEQ ID NO: 608, SEQ ID NO: 609, SEQ ID NO: 610, SEQ ID NO: 611, SEQ ID NO: 612, SEQ ID NO: 613, SEQ ID NO: 614, SEQ ID NO: 615, SEQ ID NO: 616, SEQ ID NO: 617, SEQ ID NO: 618, SEQ ID NO: 619, SEQ ID NO: 620, SEQ ID NO: 621, SEQ ID NO: 622, SEQ ID NO: 623, SEQ ID NO: 624, SEQ ID NO: 625, SEQ ID NO: 626, SEQ ID NO: 627, SEQ ID NO: 628, SEQ ID NO: 629, SEQ ID NO: 630, SEQ ID NO: 631, SEQ ID NO: 632, SEQ ID NO: 633, SEQ ID NO: 634, SEQ ID NO: 635, SEQ ID NO: 636, SEQ ID NO: 637, SEQ ID NO: 638, SEQ ID NO: 639, SEQ ID NO: 640, SEQ ID NO: 641, SEQ ID NO: 642, SEQ ID NO: 643, SEQ ID NO: 644, SEQ ID NO: 645, SEQ ID NO: 646, SEQ ID NO: 647, SEQ ID NO: 648, SEQ ID NO: 649, SEQ ID NO: 650, SEQ ID NO: 651, SEQ ID NO: 652, SEQ ID NO: 653, SEQ ID NO: 654, SEQ ID NO: 655, SEQ ID NO: 656, SEQ ID NO: 657, SEQ ID NO: 658, SEQ ID NO: 659, SEQ ID NO: 660, SEQ ID NO: 661, SEQ ID NO: 662, SEQ ID NO: 663, SEQ ID NO: 664, SEQ ID NO: 665, SEQ ID NO: 666, SEQ ID NO: 667, SEQ ID NO: 668, SEQ ID NO: 669, SEQ ID NO: 670, SEQ ID NO: 671, SEQ ID NO: 672, SEQ ID NO: 673, SEQ ID NO: 674, SEQ ID NO: 675, SEQ ID NO: 676, SEQ ID NO: 677, SEQ ID NO: 678, SEQ ID NO: 679, SEQ ID NO: 680, SEQ ID NO: 681, SEQ ID NO: 682, SEQ ID NO: 683, SEQ ID NO: 684, SEQ ID NO: 685, SEQ ID NO: 686, SEQ ID NO: 687, SEQ ID NO: 688, SEQ ID NO: 689, SEQ ID NO: 690, SEQ ID NO: 691, SEQ ID NO: 692, SEQ ID NO: 693, SEQ ID NO: 694, SEQ ID NO: 695, or SEQ ID NO: 696.

[0715] In some examples of any of the ABPCs described herein, the first antigen-binding domain includes a light chain variable domain comprising SEQ ID NO: 753, and a heavy chain variable domain comprising: SEQ ID NO: 502, SEQ ID NO: 510, SEQ ID NO: 511, SEQ ID NO: 512, SEQ ID NO: 513, SEQ ID NO: 514, SEQ ID NO: 515, SEQ ID NO: 516, SEQ ID NO: 517, SEQ ID NO: 518, SEQ ID NO: 519, SEQ ID NO: 520, SEQ ID NO: 521, SEQ ID NO: 522, SEQ ID NO: 523, SEQ ID NO: 524, SEQ ID NO: 525, SEQ ID NO: 526, SEQ ID NO: 527, SEQ ID NO: 528, SEQ ID NO: 529, SEQ ID NO: 530, SEQ ID NO: 531, SEQ ID NO: 532, SEQ ID NO: 533, SEQ ID NO: 534, SEQ ID NO: 535, SEQ ID NO: 536, SEQ ID NO: 537, SEQ ID NO: 538, SEQ ID NO: 539, SEQ ID NO: 540, SEQ ID NO: 541, SEQ ID NO: 542, SEQ ID NO: 543, SEQ ID NO: 544, SEQ ID NO: 545, SEQ ID NO: 546, SEQ ID NO: 547, SEQ ID NO: 548, SEQ ID NO: 577, SEQ ID NO: 578, SEQ ID NO: 579, SEQ ID NO: 580, SEQ ID NO: 581, SEQ ID NO: 582, SEQ ID NO: 583, SEQ ID NO: 584, SEQ ID NO: 585, SEQ ID NO: 586, SEQ ID NO: 587, SEQ ID NO: 588, SEQ ID NO: 589, SEQ ID NO: 590, SEQ ID NO: 591, SEQ ID NO: 592, SEQ ID NO: 593, SEQ ID NO: 594, SEQ ID NO: 595, SEQ ID NO: 596, SEQ ID NO: 597, SEQ ID NO: 598, SEQ ID NO: 599, SEQ ID NO: 600, SEQ ID NO: 601, SEQ ID NO: 602, SEQ ID NO: 603, SEQ ID NO: 604, SEQ ID NO: 605, SEQ ID NO: 606, SEQ ID NO: 607, SEQ ID NO: 608, SEQ ID NO: 609, SEQ ID NO: 610, SEQ ID NO: 611, SEQ ID NO: 612, SEQ ID NO: 613, SEQ ID NO: 614, SEQ ID NO: 615, SEQ ID NO: 616, SEQ ID NO: 617, SEQ ID NO: 618, SEQ ID NO: 619, SEQ ID NO: 620, SEQ ID NO: 621, SEQ ID NO: 622, SEQ ID NO: 623, SEQ ID NO: 624, SEQ ID NO: 625, SEQ ID NO: 626, SEQ ID NO: 627, SEQ ID NO: 628, SEQ ID NO: 629, SEQ ID NO: 630, SEQ ID NO: 631, SEQ ID NO: 632, SEQ ID NO: 633, SEQ ID NO: 634, SEQ ID NO: 635, SEQ ID NO: 636, SEQ ID NO: 637, SEQ ID NO: 638, SEQ ID NO: 639, SEQ ID NO: 640, SEQ ID NO: 641, SEQ ID NO: 642, SEQ ID NO: 643, SEQ ID NO: 644, SEQ ID NO: 645, SEQ ID NO: 646, SEQ ID NO: 647, SEQ ID NO: 648, SEQ ID NO: 649, SEQ ID NO: 650, SEQ ID NO: 651, SEQ ID NO: 652, SEQ ID NO: 653, SEQ ID NO: 654, SEQ ID NO: 655, SEQ ID NO: 656, SEQ ID NO: 657, SEQ ID NO: 658, SEQ ID NO: 659, SEQ ID NO: 660, SEQ ID NO: 661, SEQ ID NO: 662, SEQ ID NO: 663, SEQ ID NO: 664, SEQ ID NO: 665, SEQ ID NO: 666, SEQ ID NO: 667, SEQ ID NO: 668, SEQ ID NO: 669, SEQ ID NO: 670, SEQ ID NO: 671, SEQ ID NO: 672, SEQ ID NO: 673, SEQ ID NO: 674, SEQ ID NO: 675, SEQ ID NO: 676, SEQ ID NO: 677, SEQ ID NO: 678, SEQ ID NO: 679, SEQ ID NO: 680, SEQ ID NO: 681, SEQ ID NO: 682, SEQ ID NO: 683, SEQ ID NO: 684, SEQ ID NO: 685, SEQ ID NO: 686, SEQ ID NO: 687, SEQ ID NO: 688, SEQ ID NO: 689, SEQ ID NO: 690, SEQ ID NO: 691, SEQ ID NO: 692, SEQ ID NO: 693, SEQ ID NO: 694, SEQ ID NO: 695, or SEQ ID NO: 696.

[0716] In some examples of any of the ABPCs described herein, the first antigen-binding domain includes a light chain variable domain comprising SEQ ID NO: 754, and a heavy chain variable domain comprising: SEQ ID NO: 502, SEQ ID NO: 510, SEQ ID NO: 511, SEQ ID NO: 512, SEQ ID NO: 513, SEQ ID NO: 514, SEQ ID NO: 515, SEQ ID NO: 516, SEQ ID NO: 517, SEQ ID NO: 518, SEQ ID NO: 519, SEQ ID NO: 520, SEQ ID NO: 521, SEQ ID NO: 522, SEQ ID NO: 523, SEQ ID NO: 524, SEQ ID NO: 525, SEQ ID NO: 526, SEQ ID NO: 527, SEQ ID NO: 528, SEQ ID NO: 529, SEQ ID NO: 530, SEQ ID NO: 531, SEQ ID NO: 532, SEQ ID NO: 533, SEQ ID NO: 534, SEQ ID NO: 535, SEQ ID NO: 536, SEQ ID NO: 537, SEQ ID NO: 538, SEQ ID NO: 539, SEQ ID NO: 540, SEQ ID NO: 541, SEQ ID NO: 542, SEQ ID NO: 543, SEQ ID NO: 544, SEQ ID NO: 545, SEQ ID NO: 546, SEQ ID NO: 547, SEQ ID NO: 548, SEQ ID NO: 577, SEQ ID NO: 578, SEQ ID NO: 579, SEQ ID NO: 580, SEQ ID NO: 581, SEQ ID NO: 582, SEQ ID NO: 583, SEQ ID NO: 584, SEQ ID NO: 585, SEQ ID NO: 586, SEQ ID NO: 587, SEQ ID NO: 588, SEQ ID NO: 589, SEQ ID NO: 590, SEQ ID NO: 591, SEQ ID NO: 592, SEQ ID NO: 593, SEQ ID NO: 594, SEQ ID NO: 595, SEQ ID NO: 596, SEQ ID NO: 597, SEQ ID NO: 598, SEQ ID NO: 599, SEQ ID NO: 600, SEQ ID NO: 601, SEQ ID NO: 602, SEQ ID NO: 603, SEQ ID NO: 604, SEQ ID NO: 605, SEQ ID NO: 606, SEQ ID NO: 607, SEQ ID NO: 608, SEQ ID NO: 609, SEQ ID NO: 610, SEQ ID NO: 611, SEQ ID NO: 612, SEQ ID NO: 613, SEQ ID NO: 614, SEQ ID NO: 615, SEQ ID NO: 616, SEQ ID NO: 617, SEQ ID NO: 618, SEQ ID NO: 619, SEQ ID NO: 620, SEQ ID NO: 621, SEQ ID NO: 622, SEQ ID NO: 623, SEQ ID NO: 624, SEQ ID NO: 625, SEQ ID NO: 626, SEQ ID NO: 627, SEQ ID NO: 628, SEQ ID NO: 629, SEQ ID NO: 630, SEQ ID NO: 631, SEQ ID NO: 632, SEQ ID NO: 633, SEQ ID NO: 634, SEQ ID NO: 635, SEQ ID NO: 636, SEQ ID NO: 637, SEQ ID NO: 638, SEQ ID NO: 639, SEQ ID NO: 640, SEQ ID NO: 641, SEQ ID NO: 642, SEQ ID NO: 643, SEQ ID NO: 644, SEQ ID NO: 645, SEQ ID NO: 646, SEQ ID NO: 647, SEQ ID NO: 648, SEQ ID NO: 649, SEQ ID NO: 650, SEQ ID NO: 651, SEQ ID NO: 652, SEQ ID NO: 653, SEQ ID NO: 654, SEQ ID NO: 655, SEQ ID NO: 656, SEQ ID NO: 657, SEQ ID NO: 658, SEQ ID NO: 659, SEQ ID NO: 660, SEQ ID NO: 661, SEQ ID NO: 662, SEQ ID NO: 663, SEQ ID NO: 664, SEQ ID NO: 665, SEQ ID NO: 666, SEQ ID NO: 667, SEQ ID NO: 668, SEQ ID NO: 669, SEQ ID NO: 670, SEQ ID NO: 671, SEQ ID NO: 672, SEQ ID NO: 673, SEQ ID NO: 674, SEQ ID NO: 675, SEQ ID NO: 676, SEQ ID NO: 677, SEQ ID NO: 678, SEQ ID NO: 679, SEQ ID NO: 680, SEQ ID NO: 681, SEQ ID NO: 682, SEQ ID NO: 683, SEQ ID NO: 684, SEQ ID NO: 685, SEQ ID NO: 686, SEQ ID NO: 687, SEQ ID NO: 688, SEQ ID NO: 689, SEQ ID NO: 690, SEQ ID NO: 691, SEQ ID NO: 692, SEQ ID NO: 693, SEQ ID NO: 694, SEQ ID NO: 695, or SEQ ID NO: 696.

[0717] In some examples of any of the ABPCs described herein, the first antigen-binding domain includes a light chain variable domain comprising SEQ ID NO: 755, and a heavy chain variable domain comprising: SEQ ID NO: 502, SEQ ID NO: 510, SEQ ID NO: 511, SEQ ID NO: 512, SEQ ID NO: 513, SEQ ID NO: 514, SEQ ID NO: 515, SEQ ID NO: 516, SEQ ID NO: 517, SEQ ID NO: 518, SEQ ID NO: 519, SEQ ID NO: 520, SEQ ID NO: 521, SEQ ID NO: 522, SEQ ID NO: 523, SEQ ID NO: 524, SEQ ID NO: 525, SEQ ID NO: 526, SEQ ID NO: 527, SEQ ID NO: 528, SEQ ID NO: 529, SEQ ID NO: 530, SEQ ID NO: 531, SEQ ID NO: 532, SEQ ID NO: 533, SEQ ID NO: 534, SEQ ID NO: 535, SEQ ID NO: 536, SEQ ID NO: 537, SEQ ID NO: 538, SEQ ID NO: 539, SEQ ID NO: 540, SEQ ID NO: 541, SEQ ID NO: 542, SEQ ID NO: 543, SEQ ID NO: 544, SEQ ID NO: 545, SEQ ID NO: 546, SEQ ID NO: 547, SEQ ID NO: 548, SEQ ID NO: 577, SEQ ID NO: 578, SEQ ID NO: 579, SEQ ID NO: 580, SEQ ID NO: 581, SEQ ID NO: 582, SEQ ID NO: 583, SEQ ID NO: 584, SEQ ID NO: 585, SEQ ID NO: 586, SEQ ID NO: 587, SEQ ID NO: 588, SEQ ID NO: 589, SEQ ID NO: 590, SEQ ID NO: 591, SEQ ID NO: 592, SEQ ID NO: 593, SEQ ID NO: 594, SEQ ID NO: 595, SEQ ID NO: 596, SEQ ID NO: 597, SEQ ID NO: 598, SEQ ID NO: 599, SEQ ID NO: 600, SEQ ID NO: 601, SEQ ID NO: 602, SEQ ID NO: 603, SEQ ID NO: 604, SEQ ID NO: 605, SEQ ID NO: 606, SEQ ID NO: 607, SEQ ID NO: 608, SEQ ID NO: 609, SEQ ID NO: 610, SEQ ID NO: 611, SEQ ID NO: 612, SEQ ID NO: 613, SEQ ID NO: 614, SEQ ID NO: 615, SEQ ID NO: 616, SEQ ID NO: 617, SEQ ID NO: 618, SEQ ID NO: 619, SEQ ID NO: 620, SEQ ID NO: 621, SEQ ID NO: 622, SEQ ID NO: 623, SEQ ID NO: 624, SEQ ID NO: 625, SEQ ID NO: 626, SEQ ID NO: 627, SEQ ID NO: 628, SEQ ID NO: 629, SEQ ID NO: 630, SEQ ID NO: 631, SEQ ID NO: 632, SEQ ID NO: 633, SEQ ID NO: 634, SEQ ID NO: 635, SEQ ID NO: 636, SEQ ID NO: 637, SEQ ID NO: 638, SEQ ID NO: 639, SEQ ID NO: 640, SEQ ID NO: 641, SEQ ID NO: 642, SEQ ID NO: 643, SEQ ID NO: 644, SEQ ID NO: 645, SEQ ID NO: 646, SEQ ID NO: 647, SEQ ID NO: 648, SEQ ID NO: 649, SEQ ID NO: 650, SEQ ID NO: 651, SEQ ID NO: 652, SEQ ID NO: 653, SEQ ID NO: 654, SEQ ID NO: 655, SEQ ID NO: 656, SEQ ID NO: 657, SEQ ID NO: 658, SEQ ID NO: 659, SEQ ID NO: 660, SEQ ID NO: 661, SEQ ID NO: 662, SEQ ID NO: 663, SEQ ID NO: 664, SEQ ID NO: 665, SEQ ID NO: 666, SEQ ID NO: 667, SEQ ID NO: 668, SEQ ID NO: 669, SEQ ID NO: 670, SEQ ID NO: 671, SEQ ID NO: 672, SEQ ID NO: 673, SEQ ID NO: 674, SEQ ID NO: 675, SEQ ID NO: 676, SEQ ID NO: 677, SEQ ID NO: 678, SEQ ID NO: 679, SEQ ID NO: 680, SEQ ID NO: 681, SEQ ID NO: 682, SEQ ID NO: 683, SEQ ID NO: 684, SEQ ID NO: 685, SEQ ID NO: 686, SEQ ID NO: 687, SEQ ID NO: 688, SEQ ID NO: 689, SEQ ID NO: 690, SEQ ID NO: 691, SEQ ID NO: 692, SEQ ID NO: 693, SEQ ID NO: 694, SEQ ID NO: 695, or SEQ ID NO: 696.

[0718] In some examples of any of the ABPCs described herein, the first antigen-binding domain includes a light chain variable domain comprising SEQ ID NO: 756, and a heavy chain variable domain comprising: SEQ ID NO: 502, SEQ ID NO: 510, SEQ ID NO: 511, SEQ ID NO: 512, SEQ ID NO: 513, SEQ ID NO: 514, SEQ ID NO: 515, SEQ ID NO: 516, SEQ ID NO: 517, SEQ ID NO: 518, SEQ ID NO: 519, SEQ ID NO: 520, SEQ ID NO: 521, SEQ ID NO: 522, SEQ ID NO: 523, SEQ ID NO: 524, SEQ ID NO: 525, SEQ ID NO: 526, SEQ ID NO: 527, SEQ ID NO: 528, SEQ ID NO: 529, SEQ ID NO: 530, SEQ ID NO: 531, SEQ ID NO: 532, SEQ ID NO: 533, SEQ ID NO: 534, SEQ ID NO: 535, SEQ ID NO: 536, SEQ ID NO: 537, SEQ ID NO: 538, SEQ ID NO: 539, SEQ ID NO: 540, SEQ ID NO: 541, SEQ ID NO: 542, SEQ ID NO: 543, SEQ ID NO: 544, SEQ ID NO: 545, SEQ ID NO: 546, SEQ ID NO: 547, SEQ ID NO: 548, SEQ ID NO: 577, SEQ ID NO: 578, SEQ ID NO: 579, SEQ ID NO: 580, SEQ ID NO: 581, SEQ ID NO: 582, SEQ ID NO: 583, SEQ ID NO: 584, SEQ ID NO: 585, SEQ ID NO: 586, SEQ ID NO: 587, SEQ ID NO: 588, SEQ ID NO: 589, SEQ ID NO: 590, SEQ ID NO: 591, SEQ ID NO: 592, SEQ ID NO: 593, SEQ ID NO: 594, SEQ ID NO: 595, SEQ ID NO: 596, SEQ ID NO: 597, SEQ ID NO: 598, SEQ ID NO: 599, SEQ ID NO: 600, SEQ ID NO: 601, SEQ ID NO: 602, SEQ ID NO: 603, SEQ ID NO: 604, SEQ ID NO: 605, SEQ ID NO: 606, SEQ ID NO: 607, SEQ ID NO: 608, SEQ ID NO: 609, SEQ ID NO: 610, SEQ ID NO: 611, SEQ ID NO: 612, SEQ ID NO: 613, SEQ ID NO: 614, SEQ ID NO: 615, SEQ ID NO: 616, SEQ ID NO: 617, SEQ ID NO: 618, SEQ ID NO: 619, SEQ ID NO: 620, SEQ ID NO: 621, SEQ ID NO: 622, SEQ ID NO: 623, SEQ ID NO: 624, SEQ ID NO: 625, SEQ ID NO: 626, SEQ ID NO: 627, SEQ ID NO: 628, SEQ ID NO: 629, SEQ ID NO: 630, SEQ ID NO: 631, SEQ ID NO: 632, SEQ ID NO: 633, SEQ ID NO: 634, SEQ ID NO: 635, SEQ ID NO: 636, SEQ ID NO: 637, SEQ ID NO: 638, SEQ ID NO: 639, SEQ ID NO: 640, SEQ ID NO: 641, SEQ ID NO: 642, SEQ ID NO: 643, SEQ ID NO: 644, SEQ ID NO: 645, SEQ ID NO: 646, SEQ ID NO: 647, SEQ ID NO: 648, SEQ ID NO: 649, SEQ ID NO: 650, SEQ ID NO: 651, SEQ ID NO: 652, SEQ ID NO: 653, SEQ ID NO: 654, SEQ ID NO: 655, SEQ ID NO: 656, SEQ ID NO: 657, SEQ ID NO: 658, SEQ ID NO: 659, SEQ ID NO: 660, SEQ ID NO: 661, SEQ ID NO: 662, SEQ ID NO: 663, SEQ ID NO: 664, SEQ ID NO: 665, SEQ ID NO: 666, SEQ ID NO: 667, SEQ ID NO: 668, SEQ ID NO: 669, SEQ ID NO: 670, SEQ ID NO: 671, SEQ ID NO: 672, SEQ ID NO: 673, SEQ ID NO: 674, SEQ ID NO: 675, SEQ ID NO: 676, SEQ ID NO: 677, SEQ ID NO: 678, SEQ ID NO: 679, SEQ ID NO: 680, SEQ ID NO: 681, SEQ ID NO: 682, SEQ ID NO: 683, SEQ ID NO: 684, SEQ ID NO: 685, SEQ ID NO: 686, SEQ ID NO: 687, SEQ ID NO: 688, SEQ ID NO: 689, SEQ ID NO: 690, SEQ ID NO: 691, SEQ ID NO: 692, SEQ ID NO: 693, SEQ ID NO: 694, SEQ ID NO: 695, or SEQ ID NO: 696.

[0719] In some examples of any of the ABPCs described herein, the first antigen-binding domain includes a light chain variable domain comprising SEQ ID NO: 757, and a heavy chain variable domain comprising: SEQ ID NO: 502, SEQ ID NO: 510, SEQ ID NO: 511, SEQ ID NO: 512, SEQ ID NO: 513, SEQ ID NO: 514, SEQ ID NO: 515, SEQ ID NO: 516, SEQ ID NO: 517, SEQ ID NO: 518, SEQ ID NO: 519, SEQ ID NO: 520, SEQ ID NO: 521, SEQ ID NO: 522, SEQ ID NO: 523, SEQ ID NO: 524, SEQ ID NO: 525, SEQ ID NO: 526, SEQ ID NO: 527, SEQ ID NO: 528, SEQ ID NO: 529, SEQ ID NO: 530, SEQ ID NO: 531, SEQ ID NO: 532, SEQ ID NO: 533, SEQ ID NO: 534, SEQ ID NO: 535, SEQ ID NO: 536, SEQ ID NO: 537, SEQ ID NO: 538, SEQ ID NO: 539, SEQ ID NO: 540, SEQ ID NO: 541, SEQ ID NO: 542, SEQ ID NO: 543, SEQ ID NO: 544, SEQ ID NO: 545, SEQ ID NO: 546, SEQ ID NO: 547, SEQ ID NO: 548, SEQ ID NO: 577, SEQ ID NO: 578, SEQ ID NO: 579, SEQ ID NO: 580, SEQ ID NO: 581, SEQ ID NO: 582, SEQ ID NO: 583, SEQ ID NO: 584, SEQ ID NO: 585, SEQ ID NO: 586, SEQ ID NO: 587, SEQ ID NO: 588, SEQ ID NO: 589, SEQ ID NO: 590, SEQ ID NO: 591, SEQ ID NO: 592, SEQ ID NO: 593, SEQ ID NO: 594, SEQ ID NO: 595, SEQ ID NO: 596, SEQ ID NO: 597, SEQ ID NO: 598, SEQ ID NO: 599, SEQ ID NO: 600, SEQ ID NO: 601, SEQ ID NO: 602, SEQ ID NO: 603, SEQ ID NO: 604, SEQ ID NO: 605, SEQ ID NO: 606, SEQ ID NO: 607, SEQ ID NO: 608, SEQ ID NO: 609, SEQ ID NO: 610, SEQ ID NO: 611, SEQ ID NO: 612, SEQ ID NO: 613, SEQ ID NO: 614, SEQ ID NO: 615, SEQ ID NO: 616, SEQ ID NO: 617, SEQ ID NO: 618, SEQ ID NO: 619, SEQ ID NO: 620, SEQ ID NO: 621, SEQ ID NO: 622, SEQ ID NO: 623, SEQ ID NO: 624, SEQ ID NO: 625, SEQ ID NO: 626, SEQ ID NO: 627, SEQ ID NO: 628, SEQ ID NO: 629, SEQ ID NO: 630, SEQ ID NO: 631, SEQ ID NO: 632, SEQ ID NO: 633, SEQ ID NO: 634, SEQ ID NO: 635, SEQ ID NO: 636, SEQ ID NO: 637, SEQ ID NO: 638, SEQ ID NO: 639, SEQ ID NO: 640, SEQ ID NO: 641, SEQ ID NO: 642, SEQ ID NO: 643, SEQ ID NO: 644, SEQ ID NO: 645, SEQ ID NO: 646, SEQ ID NO: 647, SEQ ID NO: 648, SEQ ID NO: 649, SEQ ID NO: 650, SEQ ID NO: 651, SEQ ID NO: 652, SEQ ID NO: 653, SEQ ID NO: 654, SEQ ID NO: 655, SEQ ID NO: 656, SEQ ID NO: 657, SEQ ID NO: 658, SEQ ID NO: 659, SEQ ID NO: 660, SEQ ID NO: 661, SEQ ID NO: 662, SEQ ID NO: 663, SEQ ID NO: 664, SEQ ID NO: 665, SEQ ID NO: 666, SEQ ID NO: 667, SEQ ID NO: 668, SEQ ID NO: 669, SEQ ID NO: 670, SEQ ID NO: 671, SEQ ID NO: 672, SEQ ID NO: 673, SEQ ID NO: 674, SEQ ID NO: 675, SEQ ID NO: 676, SEQ ID NO: 677, SEQ ID NO: 678, SEQ ID NO: 679, SEQ ID NO: 680, SEQ ID NO: 681, SEQ ID NO: 682, SEQ ID NO: 683, SEQ ID NO: 684, SEQ ID NO: 685, SEQ ID NO: 686, SEQ ID NO: 687, SEQ ID NO: 688, SEQ ID NO: 689, SEQ ID NO: 690, SEQ ID NO: 691, SEQ ID NO: 692, SEQ ID NO: 693, SEQ ID NO: 694, SEQ ID NO: 695, or SEQ ID NO: 696.

[0720] In some examples of any of the ABPCs described herein, the first antigen-binding domain includes a light chain variable domain comprising SEQ ID NO: 758, and a heavy chain variable domain comprising: SEQ ID NO: 502, SEQ ID NO: 510, SEQ ID NO: 511, SEQ ID NO: 512, SEQ ID NO: 513, SEQ ID NO: 514, SEQ ID NO: 515, SEQ ID NO: 516, SEQ ID NO: 517, SEQ ID NO: 518, SEQ ID NO: 519, SEQ ID NO: 520, SEQ ID NO: 521, SEQ ID NO: 522, SEQ ID NO: 523, SEQ ID NO: 524, SEQ ID NO: 525, SEQ ID NO: 526, SEQ ID NO: 527, SEQ ID NO: 528, SEQ ID NO: 529, SEQ ID NO: 530, SEQ ID NO: 531, SEQ ID NO: 532, SEQ ID NO: 533, SEQ ID NO: 534, SEQ ID NO: 535, SEQ ID NO: 536, SEQ ID NO: 537, SEQ ID NO: 538, SEQ ID NO: 539, SEQ ID NO: 540, SEQ ID NO: 541, SEQ ID NO: 542, SEQ ID NO: 543, SEQ ID NO: 544, SEQ ID NO: 545, SEQ ID NO: 546, SEQ ID NO: 547, SEQ ID NO: 548, SEQ ID NO: 577, SEQ ID NO: 578, SEQ ID NO: 579, SEQ ID NO: 580, SEQ ID NO: 581, SEQ ID NO: 582, SEQ ID NO: 583, SEQ ID NO: 584, SEQ ID NO: 585, SEQ ID NO: 586, SEQ ID NO: 587, SEQ ID NO: 588, SEQ ID NO: 589, SEQ ID NO: 590, SEQ ID NO: 591, SEQ ID NO: 592, SEQ ID NO: 593, SEQ ID NO: 594, SEQ ID NO: 595, SEQ ID NO: 596, SEQ ID NO: 597, SEQ ID NO: 598, SEQ ID NO: 599, SEQ ID NO: 600, SEQ ID NO: 601, SEQ ID NO: 602, SEQ ID NO: 603, SEQ ID NO: 604, SEQ ID NO: 605, SEQ ID NO: 606, SEQ ID NO: 607, SEQ ID NO: 608, SEQ ID NO: 609, SEQ ID NO: 610, SEQ ID NO: 611, SEQ ID NO: 612, SEQ ID NO: 613, SEQ ID NO: 614, SEQ ID NO: 615, SEQ ID NO: 616, SEQ ID NO: 617, SEQ ID NO: 618, SEQ ID NO: 619, SEQ ID NO: 620, SEQ ID NO: 621, SEQ ID NO: 622, SEQ ID NO: 623, SEQ ID NO: 624, SEQ ID NO: 625, SEQ ID NO: 626, SEQ ID NO: 627, SEQ ID NO: 628, SEQ ID NO: 629, SEQ ID NO: 630, SEQ ID NO: 631, SEQ ID NO: 632, SEQ ID NO: 633, SEQ ID NO: 634, SEQ ID NO: 635, SEQ ID NO: 636, SEQ ID NO: 637, SEQ ID NO: 638, SEQ ID NO: 639, SEQ ID NO: 640, SEQ ID NO: 641, SEQ ID NO: 642, SEQ ID NO: 643, SEQ ID NO: 644, SEQ ID NO: 645, SEQ ID NO: 646, SEQ ID NO: 647, SEQ ID NO: 648, SEQ ID NO: 649, SEQ ID NO: 650, SEQ ID NO: 651, SEQ ID NO: 652, SEQ ID NO: 653, SEQ ID NO: 654, SEQ ID NO: 655, SEQ ID NO: 656, SEQ ID NO: 657, SEQ ID NO: 658, SEQ ID NO: 659, SEQ ID NO: 660, SEQ ID NO: 661, SEQ ID NO: 662, SEQ ID NO: 663, SEQ ID NO: 664, SEQ ID NO: 665, SEQ ID NO: 666, SEQ ID NO: 667, SEQ ID NO: 668, SEQ ID NO: 669, SEQ ID NO: 670, SEQ ID NO: 671, SEQ ID NO: 672, SEQ ID NO: 673, SEQ ID NO: 674, SEQ ID NO: 675, SEQ ID NO: 676, SEQ ID NO: 677, SEQ ID NO: 678, SEQ ID NO: 679, SEQ ID NO: 680, SEQ ID NO: 681, SEQ ID NO: 682, SEQ ID NO: 683, SEQ ID NO: 684, SEQ ID NO: 685, SEQ ID NO: 686, SEQ ID NO: 687, SEQ ID NO: 688, SEQ ID NO: 689, SEQ ID NO: 690, SEQ ID NO: 691, SEQ ID NO: 692, SEQ ID NO: 693, SEQ ID NO: 694, SEQ ID NO: 695, or SEQ ID NO: 696.

[0721] In some examples of any of the ABPCs described herein, the first antigen-binding domain includes a light chain variable domain comprising SEQ ID NO: 759, and a heavy chain variable domain comprising: SEQ ID NO: 502, SEQ ID NO: 510, SEQ ID NO: 511, SEQ ID NO: 512, SEQ ID NO: 513, SEQ ID NO: 514, SEQ ID NO: 515, SEQ ID NO: 516, SEQ ID NO: 517, SEQ ID NO: 518, SEQ ID NO: 519, SEQ ID NO: 520, SEQ ID NO: 521, SEQ ID NO: 522, SEQ ID NO: 523, SEQ ID NO: 524, SEQ ID NO: 525, SEQ ID NO: 526, SEQ ID NO: 527, SEQ ID NO: 528, SEQ ID NO: 529, SEQ ID NO: 530, SEQ ID NO: 531, SEQ ID NO: 532, SEQ ID NO: 533, SEQ ID NO: 534, SEQ ID NO: 535, SEQ ID NO: 536, SEQ ID NO: 537, SEQ ID NO: 538, SEQ ID NO: 539, SEQ ID NO: 540, SEQ ID NO: 541, SEQ ID NO: 542, SEQ ID NO: 543, SEQ ID NO: 544, SEQ ID NO: 545, SEQ ID NO: 546, SEQ ID NO: 547, SEQ ID NO: 548, SEQ ID NO: 577, SEQ ID NO: 578, SEQ ID NO: 579, SEQ ID NO: 580, SEQ ID NO: 581, SEQ ID NO: 582, SEQ ID NO: 583, SEQ ID NO: 584, SEQ ID NO: 585, SEQ ID NO: 586, SEQ ID NO: 587, SEQ ID NO: 588, SEQ ID NO: 589, SEQ ID NO: 590, SEQ ID NO: 591, SEQ ID NO: 592, SEQ ID NO: 593, SEQ ID NO: 594, SEQ ID NO: 595, SEQ ID NO: 596, SEQ ID NO: 597, SEQ ID NO: 598, SEQ ID NO: 599, SEQ ID NO: 600, SEQ ID NO: 601, SEQ ID NO: 602, SEQ ID NO: 603, SEQ ID NO: 604, SEQ ID NO: 605, SEQ ID NO: 606, SEQ ID NO: 607, SEQ ID NO: 608, SEQ ID NO: 609, SEQ ID NO: 610, SEQ ID NO: 611, SEQ ID NO: 612, SEQ ID NO: 613, SEQ ID NO: 614, SEQ ID NO: 615, SEQ ID NO: 616, SEQ ID NO: 617, SEQ ID NO: 618, SEQ ID NO: 619, SEQ ID NO: 620, SEQ ID NO: 621, SEQ ID NO: 622, SEQ ID NO: 623, SEQ ID NO: 624, SEQ ID NO: 625, SEQ ID NO: 626, SEQ ID NO: 627, SEQ ID NO: 628, SEQ ID NO: 629, SEQ ID NO: 630, SEQ ID NO: 631, SEQ ID NO: 632, SEQ ID NO: 633, SEQ ID NO: 634, SEQ ID NO: 635, SEQ ID NO: 636, SEQ ID NO: 637, SEQ ID NO: 638, SEQ ID NO: 639, SEQ ID NO: 640, SEQ ID NO: 641, SEQ ID NO: 642, SEQ ID NO: 643, SEQ ID NO: 644, SEQ ID NO: 645, SEQ ID NO: 646, SEQ ID NO: 647, SEQ ID NO: 648, SEQ ID NO: 649, SEQ ID NO: 650, SEQ ID NO: 651, SEQ ID NO: 652, SEQ ID NO: 653, SEQ ID NO: 654, SEQ ID NO: 655, SEQ ID NO: 656, SEQ ID NO: 657, SEQ ID NO: 658, SEQ ID NO: 659, SEQ ID NO: 660, SEQ ID NO: 661, SEQ ID NO: 662, SEQ ID NO: 663, SEQ ID NO: 664, SEQ ID NO: 665, SEQ ID NO: 666, SEQ ID NO: 667, SEQ ID NO: 668, SEQ ID NO: 669, SEQ ID NO: 670, SEQ ID NO: 671, SEQ ID NO: 672, SEQ ID NO: 673, SEQ ID NO: 674, SEQ ID NO: 675, SEQ ID NO: 676, SEQ ID NO: 677, SEQ ID NO: 678, SEQ ID NO: 679, SEQ ID NO: 680, SEQ ID NO: 681, SEQ ID NO: 682, SEQ ID NO: 683, SEQ ID NO: 684, SEQ ID NO: 685, SEQ ID NO: 686, SEQ ID NO: 687, SEQ ID NO: 688, SEQ ID NO: 689, SEQ ID NO: 690, SEQ ID NO: 691, SEQ ID NO: 692, SEQ ID NO: 693, SEQ ID NO: 694, SEQ ID NO: 695, or SEQ ID NO: 696.

[0722] In some examples of any of the ABPCs described herein, the first antigen-binding domain includes a light chain variable domain comprising SEQ ID NO: 760, and a heavy chain variable domain comprising: SEQ ID NO: 502, SEQ ID NO: 510, SEQ ID NO: 511, SEQ ID NO: 512, SEQ ID NO: 513, SEQ ID NO: 514, SEQ ID NO: 515, SEQ ID NO: 516, SEQ ID NO: 517, SEQ ID NO: 518, SEQ ID NO: 519, SEQ ID NO: 520, SEQ ID NO: 521, SEQ ID NO: 522, SEQ ID NO: 523, SEQ ID NO: 524, SEQ ID NO: 525, SEQ ID NO: 526, SEQ ID NO: 527, SEQ ID NO: 528, SEQ ID NO: 529, SEQ ID NO: 530, SEQ ID NO: 531, SEQ ID NO: 532, SEQ ID NO: 533, SEQ ID NO: 534, SEQ ID NO: 535, SEQ ID NO: 536, SEQ ID NO: 537, SEQ ID NO: 538, SEQ ID NO: 539, SEQ ID NO: 540, SEQ ID NO: 541, SEQ ID NO: 542, SEQ ID NO: 543, SEQ ID NO: 544, SEQ ID NO: 545, SEQ ID NO: 546, SEQ ID NO: 547, SEQ ID NO: 548, SEQ ID NO: 577, SEQ ID NO: 578, SEQ ID NO: 579, SEQ ID NO: 580, SEQ ID NO: 581, SEQ ID NO: 582, SEQ ID NO: 583, SEQ ID NO: 584, SEQ ID NO: 585, SEQ ID NO: 586, SEQ ID NO: 587, SEQ ID NO: 588, SEQ ID NO: 589, SEQ ID NO: 590, SEQ ID NO: 591, SEQ ID NO: 592, SEQ ID NO: 593, SEQ ID NO: 594, SEQ ID NO: 595, SEQ ID NO: 596, SEQ ID NO: 597, SEQ ID NO: 598, SEQ ID NO: 599, SEQ ID NO: 600, SEQ ID NO: 601, SEQ ID NO: 602, SEQ ID NO: 603, SEQ ID NO: 604, SEQ ID NO: 605, SEQ ID NO: 606, SEQ ID NO: 607, SEQ ID NO: 608, SEQ ID NO: 609, SEQ ID NO: 610, SEQ ID NO: 611, SEQ ID NO: 612, SEQ ID NO: 613, SEQ ID NO: 614, SEQ ID NO: 615, SEQ ID NO: 616, SEQ ID NO: 617, SEQ ID NO: 618, SEQ ID NO: 619, SEQ ID NO: 620, SEQ ID NO: 621, SEQ ID NO: 622, SEQ ID NO: 623, SEQ ID NO: 624, SEQ ID NO: 625, SEQ ID NO: 626, SEQ ID NO: 627, SEQ ID NO: 628, SEQ ID NO: 629, SEQ ID NO: 630, SEQ ID NO: 631, SEQ ID NO: 632, SEQ ID NO: 633, SEQ ID NO: 634, SEQ ID NO: 635, SEQ ID NO: 636, SEQ ID NO: 637, SEQ ID NO: 638, SEQ ID NO: 639, SEQ ID NO: 640, SEQ ID NO: 641, SEQ ID NO: 642, SEQ ID NO: 643, SEQ ID NO: 644, SEQ ID NO: 645, SEQ ID NO: 646, SEQ ID NO: 647, SEQ ID NO: 648, SEQ ID NO: 649, SEQ ID NO: 650, SEQ ID NO: 651, SEQ ID NO: 652, SEQ ID NO: 653, SEQ ID NO: 654, SEQ ID NO: 655, SEQ ID NO: 656, SEQ ID NO: 657, SEQ ID NO: 658, SEQ ID NO: 659, SEQ ID NO: 660, SEQ ID NO: 661, SEQ ID NO: 662, SEQ ID NO: 663, SEQ ID NO: 664, SEQ ID NO: 665, SEQ ID NO: 666, SEQ ID NO: 667, SEQ ID NO: 668, SEQ ID NO: 669, SEQ ID NO: 670, SEQ ID NO: 671, SEQ ID NO: 672, SEQ ID NO: 673, SEQ ID NO: 674, SEQ ID NO: 675, SEQ ID NO: 676, SEQ ID NO: 677, SEQ ID NO: 678, SEQ ID NO: 679, SEQ ID NO: 680, SEQ ID NO: 681, SEQ ID NO: 682, SEQ ID NO: 683, SEQ ID NO: 684, SEQ ID NO: 685, SEQ ID NO: 686, SEQ ID NO: 687, SEQ ID NO: 688, SEQ ID NO: 689, SEQ ID NO: 690, SEQ ID NO: 691, SEQ ID NO: 692, SEQ ID NO: 693, SEQ ID NO: 694, SEQ ID NO: 695, or SEQ ID NO: 696.

[0723] In some examples of any of the ABPCs described herein, the first antigen-binding domain includes a light chain variable domain comprising SEQ ID NO: 761, and a heavy chain variable domain comprising: SEQ ID NO: 502, SEQ ID NO: 510, SEQ ID NO: 511, SEQ ID NO: 512, SEQ ID NO: 513, SEQ ID NO: 514, SEQ ID NO: 515, SEQ ID NO: 516, SEQ ID NO: 517, SEQ ID NO: 518, SEQ ID NO: 519, SEQ ID NO: 520, SEQ ID NO: 521, SEQ ID NO: 522, SEQ ID NO: 523, SEQ ID NO: 524, SEQ ID NO: 525, SEQ ID NO: 526, SEQ ID NO: 527, SEQ ID NO: 528, SEQ ID NO: 529, SEQ ID NO: 530, SEQ ID NO: 531, SEQ ID NO: 532, SEQ ID NO: 533, SEQ ID NO: 534, SEQ ID NO: 535, SEQ ID NO: 536, SEQ ID NO: 537, SEQ ID NO: 538, SEQ ID NO: 539, SEQ ID NO: 540, SEQ ID NO: 541, SEQ ID NO: 542, SEQ ID NO: 543, SEQ ID NO: 544, SEQ ID NO: 545, SEQ ID NO: 546, SEQ ID NO: 547, SEQ ID NO: 548, SEQ ID NO: 577, SEQ ID NO: 578, SEQ ID NO: 579, SEQ ID NO: 580, SEQ ID NO: 581, SEQ ID NO: 582, SEQ ID NO: 583, SEQ ID NO: 584, SEQ ID NO: 585, SEQ ID NO: 586, SEQ ID NO: 587, SEQ ID NO: 588, SEQ ID NO: 589, SEQ ID NO: 590, SEQ ID NO: 591, SEQ ID NO: 592, SEQ ID NO: 593, SEQ ID NO: 594, SEQ ID NO: 595, SEQ ID NO: 596, SEQ ID NO: 597, SEQ ID NO: 598, SEQ ID NO: 599, SEQ ID NO: 600, SEQ ID NO: 601, SEQ ID NO: 602, SEQ ID NO: 603, SEQ ID NO: 604, SEQ ID NO: 605, SEQ ID NO: 606, SEQ ID NO: 607, SEQ ID NO: 608, SEQ ID NO: 609, SEQ ID NO: 610, SEQ ID NO: 611, SEQ ID NO: 612, SEQ ID NO: 613, SEQ ID NO: 614, SEQ ID NO: 615, SEQ ID NO: 616, SEQ ID NO: 617, SEQ ID NO: 618, SEQ ID NO: 619, SEQ ID NO: 620, SEQ ID NO: 621, SEQ ID NO: 622, SEQ ID NO: 623, SEQ ID NO: 624, SEQ ID NO: 625, SEQ ID NO: 626, SEQ ID NO: 627, SEQ ID NO: 628, SEQ ID NO: 629, SEQ ID NO: 630, SEQ ID NO: 631, SEQ ID NO: 632, SEQ ID NO: 633, SEQ ID NO: 634, SEQ ID NO: 635, SEQ ID NO: 636, SEQ ID NO: 637, SEQ ID NO: 638, SEQ ID NO: 639, SEQ ID NO: 640, SEQ ID NO: 641, SEQ ID NO: 642, SEQ ID NO: 643, SEQ ID NO: 644, SEQ ID NO: 645, SEQ ID NO: 646, SEQ ID NO: 647, SEQ ID NO: 648, SEQ ID NO: 649, SEQ ID NO: 650, SEQ ID NO: 651, SEQ ID NO: 652, SEQ ID NO: 653, SEQ ID NO: 654, SEQ ID NO: 655, SEQ ID NO: 656, SEQ ID NO: 657, SEQ ID NO: 658, SEQ ID NO: 659, SEQ ID NO: 660, SEQ ID NO: 661, SEQ ID NO: 662, SEQ ID NO: 663, SEQ ID NO: 664, SEQ ID NO: 665, SEQ ID NO: 666, SEQ ID NO: 667, SEQ ID NO: 668, SEQ ID NO: 669, SEQ ID NO: 670, SEQ ID NO: 671, SEQ ID NO: 672, SEQ ID NO: 673, SEQ ID NO: 674, SEQ ID NO: 675, SEQ ID NO: 676, SEQ ID NO: 677, SEQ ID NO: 678, SEQ ID NO: 679, SEQ ID NO: 680, SEQ ID NO: 681, SEQ ID NO: 682, SEQ ID NO: 683, SEQ ID NO: 684, SEQ ID NO: 685, SEQ ID NO: 686, SEQ ID NO: 687, SEQ ID NO: 688, SEQ ID NO: 689, SEQ ID NO: 690, SEQ ID NO: 691, SEQ ID NO: 692, SEQ ID NO: 693, SEQ ID NO: 694, SEQ ID NO: 695, or SEQ ID NO: 696.

[0724] In some examples of any of the ABPCs described herein, the first antigen-binding domain includes a light chain variable domain comprising SEQ ID NO: 762, and a heavy chain variable domain comprising: SEQ ID NO: 502, SEQ ID NO: 510, SEQ ID NO: 511, SEQ ID NO: 512, SEQ ID NO: 513, SEQ ID NO: 514, SEQ ID NO: 515, SEQ ID NO: 516, SEQ ID NO: 517, SEQ ID NO: 518, SEQ ID NO: 519, SEQ ID NO: 520, SEQ ID NO: 521, SEQ ID NO: 522, SEQ ID NO: 523, SEQ ID NO: 524, SEQ ID NO: 525, SEQ ID NO: 526, SEQ ID NO: 527, SEQ ID NO: 528, SEQ ID NO: 529, SEQ ID NO: 530, SEQ ID NO: 531, SEQ ID NO: 532, SEQ ID NO: 533, SEQ ID NO: 534, SEQ ID NO: 535, SEQ ID NO: 536, SEQ ID NO: 537, SEQ ID NO: 538, SEQ ID NO: 539, SEQ ID NO: 540, SEQ ID NO: 541, SEQ ID NO: 542, SEQ ID NO: 543, SEQ ID NO: 544, SEQ ID NO: 545, SEQ ID NO: 546, SEQ ID NO: 547, SEQ ID NO: 548, SEQ ID NO: 577, SEQ ID NO: 578, SEQ ID NO: 579, SEQ ID NO: 580, SEQ ID NO: 581, SEQ ID NO: 582, SEQ ID NO: 583, SEQ ID NO: 584, SEQ ID NO: 585, SEQ ID NO: 586, SEQ ID NO: 587, SEQ ID NO: 588, SEQ ID NO: 589, SEQ ID NO: 590, SEQ ID NO: 591, SEQ ID NO: 592, SEQ ID NO: 593, SEQ ID NO: 594, SEQ ID NO: 595, SEQ ID NO: 596, SEQ ID NO: 597, SEQ ID NO: 598, SEQ ID NO: 599, SEQ ID NO: 600, SEQ ID NO: 601, SEQ ID NO: 602, SEQ ID NO: 603, SEQ ID NO: 604, SEQ ID NO: 605, SEQ ID NO: 606, SEQ ID NO: 607, SEQ ID NO: 608, SEQ ID NO: 609, SEQ ID NO: 610, SEQ ID NO: 611, SEQ ID NO: 612, SEQ ID NO: 613, SEQ ID NO: 614, SEQ ID NO: 615, SEQ ID NO: 616, SEQ ID NO: 617, SEQ ID NO: 618, SEQ ID NO: 619, SEQ ID NO: 620, SEQ ID NO: 621, SEQ ID NO: 622, SEQ ID NO: 623, SEQ ID NO: 624, SEQ ID NO: 625, SEQ ID NO: 626, SEQ ID NO: 627, SEQ ID NO: 628, SEQ ID NO: 629, SEQ ID NO: 630, SEQ ID NO: 631, SEQ ID NO: 632, SEQ ID NO: 633, SEQ ID NO: 634, SEQ ID NO: 635, SEQ ID NO: 636, SEQ ID NO: 637, SEQ ID NO: 638, SEQ ID NO: 639, SEQ ID NO: 640, SEQ ID NO: 641, SEQ ID NO: 642, SEQ ID NO: 643, SEQ ID NO: 644, SEQ ID NO: 645, SEQ ID NO: 646, SEQ ID NO: 647, SEQ ID NO: 648, SEQ ID NO: 649, SEQ ID NO: 650, SEQ ID NO: 651, SEQ ID NO: 652, SEQ ID NO: 653, SEQ ID NO: 654, SEQ ID NO: 655, SEQ ID NO: 656, SEQ ID NO: 657, SEQ ID NO: 658, SEQ ID NO: 659, SEQ ID NO: 660, SEQ ID NO: 661, SEQ ID NO: 662, SEQ ID NO: 663, SEQ ID NO: 664, SEQ ID NO: 665, SEQ ID NO: 666, SEQ ID NO: 667, SEQ ID NO: 668, SEQ ID NO: 669, SEQ ID NO: 670, SEQ ID NO: 671, SEQ ID NO: 672, SEQ ID NO: 673, SEQ ID NO: 674, SEQ ID NO: 675, SEQ ID NO: 676, SEQ ID NO: 677, SEQ ID NO: 678, SEQ ID NO: 679, SEQ ID NO: 680, SEQ ID NO: 681, SEQ ID NO: 682, SEQ ID NO: 683, SEQ ID NO: 684, SEQ ID NO: 685, SEQ ID NO: 686, SEQ ID NO: 687, SEQ ID NO: 688, SEQ ID NO: 689, SEQ ID NO: 690, SEQ ID NO: 691, SEQ ID NO: 692, SEQ ID NO: 693, SEQ ID NO: 694, SEQ ID NO: 695, or SEQ ID NO: 696.

[0725] In some examples of any of the ABPCs described herein, the first antigen-binding domain includes a light chain variable domain comprising SEQ ID NO: 763, and a heavy chain variable domain comprising: SEQ ID NO: 502, SEQ ID NO: 510, SEQ ID NO: 511, SEQ ID NO: 512, SEQ ID NO: 513, SEQ ID NO: 514, SEQ ID NO: 515, SEQ ID NO: 516, SEQ ID NO: 517, SEQ ID NO: 518, SEQ ID NO: 519, SEQ ID NO: 520, SEQ ID NO: 521, SEQ ID NO: 522, SEQ ID NO: 523, SEQ ID NO: 524, SEQ ID NO: 525, SEQ ID NO: 526, SEQ ID NO: 527, SEQ ID NO: 528, SEQ ID NO: 529, SEQ ID NO: 530, SEQ ID NO: 531, SEQ ID NO: 532, SEQ ID NO: 533, SEQ ID NO: 534, SEQ ID NO: 535, SEQ ID NO: 536, SEQ ID NO: 537, SEQ ID NO: 538, SEQ ID NO: 539, SEQ ID NO: 540, SEQ ID NO: 541, SEQ ID NO: 542, SEQ ID NO: 543, SEQ ID NO: 544, SEQ ID NO: 545, SEQ ID NO: 546, SEQ ID NO: 547, SEQ ID NO: 548, SEQ ID NO: 577, SEQ ID NO: 578, SEQ ID NO: 579, SEQ ID NO: 580, SEQ ID NO: 581, SEQ ID NO: 582, SEQ ID NO: 583, SEQ ID NO: 584, SEQ ID NO: 585, SEQ ID NO: 586, SEQ ID NO: 587, SEQ ID NO: 588, SEQ ID NO: 589, SEQ ID NO: 590, SEQ ID NO: 591, SEQ ID NO: 592, SEQ ID NO: 593, SEQ ID NO: 594, SEQ ID NO: 595, SEQ ID NO: 596, SEQ ID NO: 597, SEQ ID NO: 598, SEQ ID NO: 599, SEQ ID NO: 600, SEQ ID NO: 601, SEQ ID NO: 602, SEQ ID NO: 603, SEQ ID NO: 604, SEQ ID NO: 605, SEQ ID NO: 606, SEQ ID NO: 607, SEQ ID NO: 608, SEQ ID NO: 609, SEQ ID NO: 610, SEQ ID NO: 611, SEQ ID NO: 612, SEQ ID NO: 613, SEQ ID NO: 614, SEQ ID NO: 615, SEQ ID NO: 616, SEQ ID NO: 617, SEQ ID NO: 618, SEQ ID NO: 619, SEQ ID NO: 620, SEQ ID NO: 621, SEQ ID NO: 622, SEQ ID NO: 623, SEQ ID NO: 624, SEQ ID NO: 625, SEQ ID NO: 626, SEQ ID NO: 627, SEQ ID NO: 628, SEQ ID NO: 629, SEQ ID NO: 630, SEQ ID NO: 631, SEQ ID NO: 632, SEQ ID NO: 633, SEQ ID NO: 634, SEQ ID NO: 635, SEQ ID NO: 636, SEQ ID NO: 637, SEQ ID NO: 638, SEQ ID NO: 639, SEQ ID NO: 640, SEQ ID NO: 641, SEQ ID NO: 642, SEQ ID NO: 643, SEQ ID NO: 644, SEQ ID NO: 645, SEQ ID NO: 646, SEQ ID NO: 647, SEQ ID NO: 648, SEQ ID NO: 649, SEQ ID NO: 650, SEQ ID NO: 651, SEQ ID NO: 652, SEQ ID NO: 653, SEQ ID NO: 654, SEQ ID NO: 655, SEQ ID NO: 656, SEQ ID NO: 657, SEQ ID NO: 658, SEQ ID NO: 659, SEQ ID NO: 660, SEQ ID NO: 661, SEQ ID NO: 662, SEQ ID NO: 663, SEQ ID NO: 664, SEQ ID NO: 665, SEQ ID NO: 666, SEQ ID NO: 667, SEQ ID NO: 668, SEQ ID NO: 669, SEQ ID NO: 670, SEQ ID NO: 671, SEQ ID NO: 672, SEQ ID NO: 673, SEQ ID NO: 674, SEQ ID NO: 675, SEQ ID NO: 676, SEQ ID NO: 677, SEQ ID NO: 678, SEQ ID NO: 679, SEQ ID NO: 680, SEQ ID NO: 681, SEQ ID NO: 682, SEQ ID NO: 683, SEQ ID NO: 684, SEQ ID NO: 685, SEQ ID NO: 686, SEQ ID NO: 687, SEQ ID NO: 688, SEQ ID NO: 689, SEQ ID NO: 690, SEQ ID NO: 691, SEQ ID NO: 692, SEQ ID NO: 693, SEQ ID NO: 694, SEQ ID NO: 695, or SEQ ID NO: 696.

[0726] In some examples of any of the ABPCs described herein, the first antigen-binding domain includes a light chain variable domain comprising SEQ ID NO: 764, and a heavy chain variable domain comprising: SEQ ID NO: 502, SEQ ID NO: 510, SEQ ID NO: 511, SEQ ID NO: 512, SEQ ID NO: 513, SEQ ID NO: 514, SEQ ID NO: 515, SEQ ID NO: 516, SEQ ID NO: 517, SEQ ID NO: 518, SEQ ID NO: 519, SEQ ID NO: 520, SEQ ID NO: 521, SEQ ID NO: 522, SEQ ID NO: 523, SEQ ID NO: 524, SEQ ID NO: 525, SEQ ID NO: 526, SEQ ID NO: 527, SEQ ID NO: 528, SEQ ID NO: 529, SEQ ID NO: 530, SEQ ID NO: 531, SEQ ID NO: 532, SEQ ID NO: 533, SEQ ID NO: 534, SEQ ID NO: 535, SEQ ID NO: 536, SEQ ID NO: 537, SEQ ID NO: 538, SEQ ID NO: 539, SEQ ID NO: 540, SEQ ID NO: 541, SEQ ID NO: 542, SEQ ID NO: 543, SEQ ID NO: 544, SEQ ID NO: 545, SEQ ID NO: 546, SEQ ID NO: 547, SEQ ID NO: 548, SEQ ID NO: 577, SEQ ID NO: 578, SEQ ID NO: 579, SEQ ID NO: 580, SEQ ID NO: 581, SEQ ID NO: 582, SEQ ID NO: 583, SEQ ID NO: 584, SEQ ID NO: 585, SEQ ID NO: 586, SEQ ID NO: 587, SEQ ID NO: 588, SEQ ID NO: 589, SEQ ID NO: 590, SEQ ID NO: 591, SEQ ID NO: 592, SEQ ID NO: 593, SEQ ID NO: 594, SEQ ID NO: 595, SEQ ID NO: 596, SEQ ID NO: 597, SEQ ID NO: 598, SEQ ID NO: 599, SEQ ID NO: 600, SEQ ID NO: 601, SEQ ID NO: 602, SEQ ID NO: 603, SEQ ID NO: 604, SEQ ID NO: 605, SEQ ID NO: 606, SEQ ID NO: 607, SEQ ID NO: 608, SEQ ID NO: 609, SEQ ID NO: 610, SEQ ID NO: 611, SEQ ID NO: 612, SEQ ID NO: 613, SEQ ID NO: 614, SEQ ID NO: 615, SEQ ID NO: 616, SEQ ID NO: 617, SEQ ID NO: 618, SEQ ID NO: 619, SEQ ID NO: 620, SEQ ID NO: 621, SEQ ID NO: 622, SEQ ID NO: 623, SEQ ID NO: 624, SEQ ID NO: 625, SEQ ID NO: 626, SEQ ID NO: 627, SEQ ID NO: 628, SEQ ID NO: 629, SEQ ID NO: 630, SEQ ID NO: 631, SEQ ID NO: 632, SEQ ID NO: 633, SEQ ID NO: 634, SEQ ID NO: 635, SEQ ID NO: 636, SEQ ID NO: 637, SEQ ID NO: 638, SEQ ID NO: 639, SEQ ID NO: 640, SEQ ID NO: 641, SEQ ID NO: 642, SEQ ID NO: 643, SEQ ID NO: 644, SEQ ID NO: 645, SEQ ID NO: 646, SEQ ID NO: 647, SEQ ID NO: 648, SEQ ID NO: 649, SEQ ID NO: 650, SEQ ID NO: 651, SEQ ID NO: 652, SEQ ID NO: 653, SEQ ID NO: 654, SEQ ID NO: 655, SEQ ID NO: 656, SEQ ID NO: 657, SEQ ID NO: 658, SEQ ID NO: 659, SEQ ID NO: 660, SEQ ID NO: 661, SEQ ID NO: 662, SEQ ID NO: 663, SEQ ID NO: 664, SEQ ID NO: 665, SEQ ID NO: 666, SEQ ID NO: 667, SEQ ID NO: 668, SEQ ID NO: 669, SEQ ID NO: 670, SEQ ID NO: 671, SEQ ID NO: 672, SEQ ID NO: 673, SEQ ID NO: 674, SEQ ID NO: 675, SEQ ID NO: 676, SEQ ID NO: 677, SEQ ID NO: 678, SEQ ID NO: 679, SEQ ID NO: 680, SEQ ID NO: 681, SEQ ID NO: 682, SEQ ID NO: 683, SEQ ID NO: 684, SEQ ID NO: 685, SEQ ID NO: 686, SEQ ID NO: 687, SEQ ID NO: 688, SEQ ID NO: 689, SEQ ID NO: 690, SEQ ID NO: 691, SEQ ID NO: 692, SEQ ID NO: 693, SEQ ID NO: 694, SEQ ID NO: 695, or SEQ ID NO: 696.

[0727] In some examples of any of the ABPCs described herein, the first antigen-binding domain includes a light chain variable domain comprising SEQ ID NO: 765, and a heavy chain variable domain comprising: SEQ ID NO: 502, SEQ ID NO: 510, SEQ ID NO: 511, SEQ ID NO: 512, SEQ ID NO: 513, SEQ ID NO: 514, SEQ ID NO: 515, SEQ ID NO: 516, SEQ ID NO: 517, SEQ ID NO: 518, SEQ ID NO: 519, SEQ ID NO: 520, SEQ ID NO: 521, SEQ ID NO: 522, SEQ ID NO: 523, SEQ ID NO: 524, SEQ ID NO: 525, SEQ ID NO: 526, SEQ ID NO: 527, SEQ ID NO: 528, SEQ ID NO: 529, SEQ ID NO: 530, SEQ ID NO: 531, SEQ ID NO: 532, SEQ ID NO: 533, SEQ ID NO: 534, SEQ ID NO: 535, SEQ ID NO: 536, SEQ ID NO: 537, SEQ ID NO: 538, SEQ ID NO: 539, SEQ ID NO: 540, SEQ ID NO: 541, SEQ ID NO: 542, SEQ ID NO: 543, SEQ ID NO: 544, SEQ ID NO: 545, SEQ ID NO: 546, SEQ ID NO: 547, SEQ ID NO: 548, SEQ ID NO: 577, SEQ ID NO: 578, SEQ ID NO: 579, SEQ ID NO: 580, SEQ ID NO: 581, SEQ ID NO: 582, SEQ ID NO: 583, SEQ ID NO: 584, SEQ ID NO: 585, SEQ ID NO: 586, SEQ ID NO: 587, SEQ ID NO: 588, SEQ ID NO: 589, SEQ ID NO: 590, SEQ ID NO: 591, SEQ ID NO: 592, SEQ ID NO: 593, SEQ ID NO: 594, SEQ ID NO: 595, SEQ ID NO: 596, SEQ ID NO: 597, SEQ ID NO: 598, SEQ ID NO: 599, SEQ ID NO: 600, SEQ ID NO: 601, SEQ ID NO: 602, SEQ ID NO: 603, SEQ ID NO: 604, SEQ ID NO: 605, SEQ ID NO: 606, SEQ ID NO: 607, SEQ ID NO: 608, SEQ ID NO: 609, SEQ ID NO: 610, SEQ ID NO: 611, SEQ ID NO: 612, SEQ ID NO: 613, SEQ ID NO: 614, SEQ ID NO: 615, SEQ ID NO: 616, SEQ ID NO: 617, SEQ ID NO: 618, SEQ ID NO: 619, SEQ ID NO: 620, SEQ ID NO: 621, SEQ ID NO: 622, SEQ ID NO: 623, SEQ ID NO: 624, SEQ ID NO: 625, SEQ ID NO: 626, SEQ ID NO: 627, SEQ ID NO: 628, SEQ ID NO: 629, SEQ ID NO: 630, SEQ ID NO: 631, SEQ ID NO: 632, SEQ ID NO: 633, SEQ ID NO: 634, SEQ ID NO: 635, SEQ ID NO: 636, SEQ ID NO: 637, SEQ ID NO: 638, SEQ ID NO: 639, SEQ ID NO: 640, SEQ ID NO: 641, SEQ ID NO: 642, SEQ ID NO: 643, SEQ ID NO: 644, SEQ ID NO: 645, SEQ ID NO: 646, SEQ ID NO: 647, SEQ ID NO: 648, SEQ ID NO: 649, SEQ ID NO: 650, SEQ ID NO: 651, SEQ ID NO: 652, SEQ ID NO: 653, SEQ ID NO: 654, SEQ ID NO: 655, SEQ ID NO: 656, SEQ ID NO: 657, SEQ ID NO: 658, SEQ ID NO: 659, SEQ ID NO: 660, SEQ ID NO: 661, SEQ ID NO: 662, SEQ ID NO: 663, SEQ ID NO: 664, SEQ ID NO: 665, SEQ ID NO: 666, SEQ ID NO: 667, SEQ ID NO: 668, SEQ ID NO: 669, SEQ ID NO: 670, SEQ ID NO: 671, SEQ ID NO: 672, SEQ ID NO: 673, SEQ ID NO: 674, SEQ ID NO: 675, SEQ ID NO: 676, SEQ ID NO: 677, SEQ ID NO: 678, SEQ ID NO: 679, SEQ ID NO: 680, SEQ ID NO: 681, SEQ ID NO: 682, SEQ ID NO: 683, SEQ ID NO: 684, SEQ ID NO: 685, SEQ ID NO: 686, SEQ ID NO: 687, SEQ ID NO: 688, SEQ ID NO: 689, SEQ ID NO: 690, SEQ ID NO: 691, SEQ ID NO: 692, SEQ ID NO: 693, SEQ ID NO: 694, SEQ ID NO: 695, or SEQ ID NO: 696.

[0728] In some examples of any of the ABPCs described herein, the first antigen-binding domain includes a light chain variable domain comprising SEQ ID NO: 766, and a heavy chain variable domain comprising: SEQ ID NO: 502, SEQ ID NO: 510, SEQ ID NO: 511, SEQ ID NO: 512, SEQ ID NO: 513, SEQ ID NO: 514, SEQ ID NO: 515, SEQ ID NO: 516, SEQ ID NO: 517, SEQ ID NO: 518, SEQ ID NO: 519, SEQ ID NO: 520, SEQ ID NO: 521, SEQ ID NO: 522, SEQ ID NO: 523, SEQ ID NO: 524, SEQ ID NO: 525, SEQ ID NO: 526, SEQ ID NO: 527, SEQ ID NO: 528, SEQ ID NO: 529, SEQ ID NO: 530, SEQ ID NO: 531, SEQ ID NO: 532, SEQ ID NO: 533, SEQ ID NO: 534, SEQ ID NO: 535, SEQ ID NO: 536, SEQ ID NO: 537, SEQ ID NO: 538, SEQ ID NO: 539, SEQ ID NO: 540, SEQ ID NO: 541, SEQ ID NO: 542, SEQ ID NO: 543, SEQ ID NO: 544, SEQ ID NO: 545, SEQ ID NO: 546, SEQ ID NO: 547, SEQ ID NO: 548, SEQ ID NO: 577, SEQ ID NO: 578, SEQ ID NO: 579, SEQ ID NO: 580, SEQ ID NO: 581, SEQ ID NO: 582, SEQ ID NO: 583, SEQ ID NO: 584, SEQ ID NO: 585, SEQ ID NO: 586, SEQ ID NO: 587, SEQ ID NO: 588, SEQ ID NO: 589, SEQ ID NO: 590, SEQ ID NO: 591, SEQ ID NO: 592, SEQ ID NO: 593, SEQ ID NO: 594, SEQ ID NO: 595, SEQ ID NO: 596, SEQ ID NO: 597, SEQ ID NO: 598, SEQ ID NO: 599, SEQ ID NO: 600, SEQ ID NO: 601, SEQ ID NO: 602, SEQ ID NO: 603, SEQ ID NO: 604, SEQ ID NO: 605, SEQ ID NO: 606, SEQ ID NO: 607, SEQ ID NO: 608, SEQ ID NO: 609, SEQ ID NO: 610, SEQ ID NO: 611, SEQ ID NO: 612, SEQ ID NO: 613, SEQ ID NO: 614, SEQ ID NO: 615, SEQ ID NO: 616, SEQ ID NO: 617, SEQ ID NO: 618, SEQ ID NO: 619, SEQ ID NO: 620, SEQ ID NO: 621, SEQ ID NO: 622, SEQ ID NO: 623, SEQ ID NO: 624, SEQ ID NO: 625, SEQ ID NO: 626, SEQ ID NO: 627, SEQ ID NO: 628, SEQ ID NO: 629, SEQ ID NO: 630, SEQ ID NO: 631, SEQ ID NO: 632, SEQ ID NO: 633, SEQ ID NO: 634, SEQ ID NO: 635, SEQ ID NO: 636, SEQ ID NO: 637, SEQ ID NO: 638, SEQ ID NO: 639, SEQ ID NO: 640, SEQ ID NO: 641, SEQ ID NO: 642, SEQ ID NO: 643, SEQ ID NO: 644, SEQ ID NO: 645, SEQ ID NO: 646, SEQ ID NO: 647, SEQ ID NO: 648, SEQ ID NO: 649, SEQ ID NO: 650, SEQ ID NO: 651, SEQ ID NO: 652, SEQ ID NO: 653, SEQ ID NO: 654, SEQ ID NO: 655, SEQ ID NO: 656, SEQ ID NO: 657, SEQ ID NO: 658, SEQ ID NO: 659, SEQ ID NO: 660, SEQ ID NO: 661, SEQ ID NO: 662, SEQ ID NO: 663, SEQ ID NO: 664, SEQ ID NO: 665, SEQ ID NO: 666, SEQ ID NO: 667, SEQ ID NO: 668, SEQ ID NO: 669, SEQ ID NO: 670, SEQ ID NO: 671, SEQ ID NO: 672, SEQ ID NO: 673, SEQ ID NO: 674, SEQ ID NO: 675, SEQ ID NO: 676, SEQ ID NO: 677, SEQ ID NO: 678, SEQ ID NO: 679, SEQ ID NO: 680, SEQ ID NO: 681, SEQ ID NO: 682, SEQ ID NO: 683, SEQ ID NO: 684, SEQ ID NO: 685, SEQ ID NO: 686, SEQ ID NO: 687, SEQ ID NO: 688, SEQ ID NO: 689, SEQ ID NO: 690, SEQ ID NO: 691, SEQ ID NO: 692, SEQ ID NO: 693, SEQ ID NO: 694, SEQ ID NO: 695, or SEQ ID NO: 696.

[0729] In some examples of any of the ABPCs described herein, the first antigen-binding domain includes a light chain variable domain comprising SEQ ID NO: 767, and a heavy chain variable domain comprising: SEQ ID NO: 502, SEQ ID NO: 510, SEQ ID NO: 511, SEQ ID NO: 512, SEQ ID NO: 513, SEQ ID NO: 514, SEQ ID NO: 515, SEQ ID NO: 516, SEQ ID NO: 517, SEQ ID NO: 518, SEQ ID NO: 519, SEQ ID NO: 520, SEQ ID NO: 521, SEQ ID NO: 522, SEQ ID NO: 523, SEQ ID NO: 524, SEQ ID NO: 525, SEQ ID NO: 526, SEQ ID NO: 527, SEQ ID NO: 528, SEQ ID NO: 529, SEQ ID NO: 530, SEQ ID NO: 531, SEQ ID NO: 532, SEQ ID NO: 533, SEQ ID NO: 534, SEQ ID NO: 535, SEQ ID NO: 536, SEQ ID NO: 537, SEQ ID NO: 538, SEQ ID NO: 539, SEQ ID NO: 540, SEQ ID NO: 541, SEQ ID NO: 542, SEQ ID NO: 543, SEQ ID NO: 544, SEQ ID NO: 545, SEQ ID NO: 546, SEQ ID NO: 547, SEQ ID NO: 548, SEQ ID NO: 577, SEQ ID NO: 578, SEQ ID NO: 579, SEQ ID NO: 580, SEQ ID NO: 581, SEQ ID NO: 582, SEQ ID NO: 583, SEQ ID NO: 584, SEQ ID NO: 585, SEQ ID NO: 586, SEQ ID NO: 587, SEQ ID NO: 588, SEQ ID NO: 589, SEQ ID NO: 590, SEQ ID NO: 591, SEQ ID NO: 592, SEQ ID NO: 593, SEQ ID NO: 594, SEQ ID NO: 595, SEQ ID NO: 596, SEQ ID NO: 597, SEQ ID NO: 598, SEQ ID NO: 599, SEQ ID NO: 600, SEQ ID NO: 601, SEQ ID NO: 602, SEQ ID NO: 603, SEQ ID NO: 604, SEQ ID NO: 605, SEQ ID NO: 606, SEQ ID NO: 607, SEQ ID NO: 608, SEQ ID NO: 609, SEQ ID NO: 610, SEQ ID NO: 611, SEQ ID NO: 612, SEQ ID NO: 613, SEQ ID NO: 614, SEQ ID NO: 615, SEQ ID NO: 616, SEQ ID NO: 617, SEQ ID NO: 618, SEQ ID NO: 619, SEQ ID NO: 620, SEQ ID NO: 621, SEQ ID NO: 622, SEQ ID NO: 623, SEQ ID NO: 624, SEQ ID NO: 625, SEQ ID NO: 626, SEQ ID NO: 627, SEQ ID NO: 628, SEQ ID NO: 629, SEQ ID NO: 630, SEQ ID NO: 631, SEQ ID NO: 632, SEQ ID NO: 633, SEQ ID NO: 634, SEQ ID NO: 635, SEQ ID NO: 636, SEQ ID NO: 637, SEQ ID NO: 638, SEQ ID NO: 639, SEQ ID NO: 640, SEQ ID NO: 641, SEQ ID NO: 642, SEQ ID NO: 643, SEQ ID NO: 644, SEQ ID NO: 645, SEQ ID NO: 646, SEQ ID NO: 647, SEQ ID NO: 648, SEQ ID NO: 649, SEQ ID NO: 650, SEQ ID NO: 651, SEQ ID NO: 652, SEQ ID NO: 653, SEQ ID NO: 654, SEQ ID NO: 655, SEQ ID NO: 656, SEQ ID NO: 657, SEQ ID NO: 658, SEQ ID NO: 659, SEQ ID NO: 660, SEQ ID NO: 661, SEQ ID NO: 662, SEQ ID NO: 663, SEQ ID NO: 664, SEQ ID NO: 665, SEQ ID NO: 666, SEQ ID NO: 667, SEQ ID NO: 668, SEQ ID NO: 669, SEQ ID NO: 670, SEQ ID NO: 671, SEQ ID NO: 672, SEQ ID NO: 673, SEQ ID NO: 674, SEQ ID NO: 675, SEQ ID NO: 676, SEQ ID NO: 677, SEQ ID NO: 678, SEQ ID NO: 679, SEQ ID NO: 680, SEQ ID NO: 681, SEQ ID NO: 682, SEQ ID NO: 683, SEQ ID NO: 684, SEQ ID NO: 685, SEQ ID NO: 686, SEQ ID NO: 687, SEQ ID NO: 688, SEQ ID NO: 689, SEQ ID NO: 690, SEQ ID NO: 691, SEQ ID NO: 692, SEQ ID NO: 693, SEQ ID NO: 694, SEQ ID NO: 695, or SEQ ID NO: 696.

[0730] In some examples of any of the ABPCs described herein, the first antigen-binding domain includes a light chain variable domain comprising SEQ ID NO: 768, and a heavy chain variable domain comprising: SEQ ID NO: 502, SEQ ID NO: 510, SEQ ID NO: 511, SEQ ID NO: 512, SEQ ID NO: 513, SEQ ID NO: 514, SEQ ID NO: 515, SEQ ID NO: 516, SEQ ID NO: 517, SEQ ID NO: 518, SEQ ID NO: 519, SEQ ID NO: 520, SEQ ID NO: 521, SEQ ID NO: 522, SEQ ID NO: 523, SEQ ID NO: 524, SEQ ID NO: 525, SEQ ID NO: 526, SEQ ID NO: 527, SEQ ID NO: 528, SEQ ID NO: 529, SEQ ID NO: 530, SEQ ID NO: 531, SEQ ID NO: 532, SEQ ID NO: 533, SEQ ID NO: 534, SEQ ID NO: 535, SEQ ID NO: 536, SEQ ID NO: 537, SEQ ID NO: 538, SEQ ID NO: 539, SEQ ID NO: 540, SEQ ID NO: 541, SEQ ID NO: 542, SEQ ID NO: 543, SEQ ID NO: 544, SEQ ID NO: 545, SEQ ID NO: 546, SEQ ID NO: 547, SEQ ID NO: 548, SEQ ID NO: 577, SEQ ID NO: 578, SEQ ID NO: 579, SEQ ID NO: 580, SEQ ID NO: 581, SEQ ID NO: 582, SEQ ID NO: 583, SEQ ID NO: 584, SEQ ID NO: 585, SEQ ID NO: 586, SEQ ID NO: 587, SEQ ID NO: 588, SEQ ID NO: 589, SEQ ID NO: 590, SEQ ID NO: 591, SEQ ID NO: 592, SEQ ID NO: 593, SEQ ID NO: 594, SEQ ID NO: 595, SEQ ID NO: 596, SEQ ID NO: 597, SEQ ID NO: 598, SEQ ID NO: 599, SEQ ID NO: 600, SEQ ID NO: 601, SEQ ID NO: 602, SEQ ID NO: 603, SEQ ID NO: 604, SEQ ID NO: 605, SEQ ID NO: 606, SEQ ID NO: 607, SEQ ID NO: 608, SEQ ID NO: 609, SEQ ID NO: 610, SEQ ID NO: 611, SEQ ID NO: 612, SEQ ID NO: 613, SEQ ID NO: 614, SEQ ID NO: 615, SEQ ID NO: 616, SEQ ID NO: 617, SEQ ID NO: 618, SEQ ID NO: 619, SEQ ID NO: 620, SEQ ID NO: 621, SEQ ID NO: 622, SEQ ID NO: 623, SEQ ID NO: 624, SEQ ID NO: 625, SEQ ID NO: 626, SEQ ID NO: 627, SEQ ID NO: 628, SEQ ID NO: 629, SEQ ID NO: 630, SEQ ID NO: 631, SEQ ID NO: 632, SEQ ID NO: 633, SEQ ID NO: 634, SEQ ID NO: 635, SEQ ID NO: 636, SEQ ID NO: 637, SEQ ID NO: 638, SEQ ID NO: 639, SEQ ID NO: 640, SEQ ID NO: 641, SEQ ID NO: 642, SEQ ID NO: 643, SEQ ID NO: 644, SEQ ID NO: 645, SEQ ID NO: 646, SEQ ID NO: 647, SEQ ID NO: 648, SEQ ID NO: 649, SEQ ID NO: 650, SEQ ID NO: 651, SEQ ID NO: 652, SEQ ID NO: 653, SEQ ID NO: 654, SEQ ID NO: 655, SEQ ID NO: 656, SEQ ID NO: 657, SEQ ID NO: 658, SEQ ID NO: 659, SEQ ID NO: 660, SEQ ID NO: 661, SEQ ID NO: 662, SEQ ID NO: 663, SEQ ID NO: 664, SEQ ID NO: 665, SEQ ID NO: 666, SEQ ID NO: 667, SEQ ID NO: 668, SEQ ID NO: 669, SEQ ID NO: 670, SEQ ID NO: 671, SEQ ID NO: 672, SEQ ID NO: 673, SEQ ID NO: 674, SEQ ID NO: 675, SEQ ID NO: 676, SEQ ID NO: 677, SEQ ID NO: 678, SEQ ID NO: 679, SEQ ID NO: 680, SEQ ID NO: 681, SEQ ID NO: 682, SEQ ID NO: 683, SEQ ID NO: 684, SEQ ID NO: 685, SEQ ID NO: 686, SEQ ID NO: 687, SEQ ID NO: 688, SEQ ID NO: 689, SEQ ID NO: 690, SEQ ID NO: 691, SEQ ID NO: 692, SEQ ID NO: 693, SEQ ID NO: 694, SEQ ID NO: 695, or SEQ ID NO: 696.

[0731] In some examples of any of the ABPCs described herein, the first antigen-binding domain includes a light chain variable domain comprising SEQ ID NO: 769, and a heavy chain variable domain comprising: SEQ ID NO: 502, SEQ ID NO: 510, SEQ ID NO: 511, SEQ ID NO: 512, SEQ ID NO: 513, SEQ ID NO: 514, SEQ ID NO: 515, SEQ ID NO: 516, SEQ ID NO: 517, SEQ ID NO: 518, SEQ ID NO: 519, SEQ ID NO: 520, SEQ ID NO: 521, SEQ ID NO: 522, SEQ ID NO: 523, SEQ ID NO: 524, SEQ ID NO: 525, SEQ ID NO: 526, SEQ ID NO: 527, SEQ ID NO: 528, SEQ ID NO: 529, SEQ ID NO: 530, SEQ ID NO: 531, SEQ ID NO: 532, SEQ ID NO: 533, SEQ ID NO: 534, SEQ ID NO: 535, SEQ ID NO: 536, SEQ ID NO: 537, SEQ ID NO: 538, SEQ ID NO: 539, SEQ ID NO: 540, SEQ ID NO: 541, SEQ ID NO: 542, SEQ ID NO: 543, SEQ ID NO: 544, SEQ ID NO: 545, SEQ ID NO: 546, SEQ ID NO: 547, SEQ ID NO: 548, SEQ ID NO: 577, SEQ ID NO: 578, SEQ ID NO: 579, SEQ ID NO: 580, SEQ ID NO: 581, SEQ ID NO: 582, SEQ ID NO: 583, SEQ ID NO: 584, SEQ ID NO: 585, SEQ ID NO: 586, SEQ ID NO: 587, SEQ ID NO: 588, SEQ ID NO: 589, SEQ ID NO: 590, SEQ ID NO: 591, SEQ ID NO: 592, SEQ ID NO: 593, SEQ ID NO: 594, SEQ ID NO: 595, SEQ ID NO: 596, SEQ ID NO: 597, SEQ ID NO: 598, SEQ ID NO: 599, SEQ ID NO: 600, SEQ ID NO: 601, SEQ ID NO: 602, SEQ ID NO: 603, SEQ ID NO: 604, SEQ ID NO: 605, SEQ ID NO: 606, SEQ ID NO: 607, SEQ ID NO: 608, SEQ ID NO: 609, SEQ ID NO: 610, SEQ ID NO: 611, SEQ ID NO: 612, SEQ ID NO: 613, SEQ ID NO: 614, SEQ ID NO: 615, SEQ ID NO: 616, SEQ ID NO: 617, SEQ ID NO: 618, SEQ ID NO: 619, SEQ ID NO: 620, SEQ ID NO: 621, SEQ ID NO: 622, SEQ ID NO: 623, SEQ ID NO: 624, SEQ ID NO: 625, SEQ ID NO: 626, SEQ ID NO: 627, SEQ ID NO: 628, SEQ ID NO: 629, SEQ ID NO: 630, SEQ ID NO: 631, SEQ ID NO: 632, SEQ ID NO: 633, SEQ ID NO: 634, SEQ ID NO: 635, SEQ ID NO: 636, SEQ ID NO: 637, SEQ ID NO: 638, SEQ ID NO: 639, SEQ ID NO: 640, SEQ ID NO: 641, SEQ ID NO: 642, SEQ ID NO: 643, SEQ ID NO: 644, SEQ ID NO: 645, SEQ ID NO: 646, SEQ ID NO: 647, SEQ ID NO: 648, SEQ ID NO: 649, SEQ ID NO: 650, SEQ ID NO: 651, SEQ ID NO: 652, SEQ ID NO: 653, SEQ ID NO: 654, SEQ ID NO: 655, SEQ ID NO: 656, SEQ ID NO: 657, SEQ ID NO: 658, SEQ ID NO: 659, SEQ ID NO: 660, SEQ ID NO: 661, SEQ ID NO: 662, SEQ ID NO: 663, SEQ ID NO: 664, SEQ ID NO: 665, SEQ ID NO: 666, SEQ ID NO: 667, SEQ ID NO: 668, SEQ ID NO: 669, SEQ ID NO: 670, SEQ ID NO: 671, SEQ ID NO: 672, SEQ ID NO: 673, SEQ ID NO: 674, SEQ ID NO: 675, SEQ ID NO: 676, SEQ ID NO: 677, SEQ ID NO: 678, SEQ ID NO: 679, SEQ ID NO: 680, SEQ ID NO: 681, SEQ ID NO: 682, SEQ ID NO: 683, SEQ ID NO: 684, SEQ ID NO: 685, SEQ ID NO: 686, SEQ ID NO: 687, SEQ ID NO: 688, SEQ ID NO: 689, SEQ ID NO: 690, SEQ ID NO: 691, SEQ ID NO: 692, SEQ ID NO: 693, SEQ ID NO: 694, SEQ ID NO: 695, or SEQ ID NO: 696.

[0732] In some examples of any of the ABPCs described herein, the first antigen-binding domain includes a light chain variable domain comprising SEQ ID NO: 770, and a heavy chain variable domain comprising: SEQ ID NO: 502, SEQ ID NO: 510, SEQ ID NO: 511, SEQ ID NO: 512, SEQ ID NO: 513, SEQ ID NO: 514, SEQ ID NO: 515, SEQ ID NO: 516, SEQ ID NO: 517, SEQ ID NO: 518, SEQ ID NO: 519, SEQ ID NO: 520, SEQ ID NO: 521, SEQ ID NO: 522, SEQ ID NO: 523, SEQ ID NO: 524, SEQ ID NO: 525, SEQ ID NO: 526, SEQ ID NO: 527, SEQ ID NO: 528, SEQ ID NO: 529, SEQ ID NO: 530, SEQ ID NO: 531, SEQ ID NO: 532, SEQ ID NO: 533, SEQ ID NO: 534, SEQ ID NO: 535, SEQ ID NO: 536, SEQ ID NO: 537, SEQ ID NO: 538, SEQ ID NO: 539, SEQ ID NO: 540, SEQ ID NO: 541, SEQ ID NO: 542, SEQ ID NO: 543, SEQ ID NO: 544, SEQ ID NO: 545, SEQ ID NO: 546, SEQ ID NO: 547, SEQ ID NO: 548, SEQ ID NO: 577, SEQ ID NO: 578, SEQ ID NO: 579, SEQ ID NO: 580, SEQ ID NO: 581, SEQ ID NO: 582, SEQ ID NO: 583, SEQ ID NO: 584, SEQ ID NO: 585, SEQ ID NO: 586, SEQ ID NO: 587, SEQ ID NO: 588, SEQ ID NO: 589, SEQ ID NO: 590, SEQ ID NO: 591, SEQ ID NO: 592, SEQ ID NO: 593, SEQ ID NO: 594, SEQ ID NO: 595, SEQ ID NO: 596, SEQ ID NO: 597, SEQ ID NO: 598, SEQ ID NO: 599, SEQ ID NO: 600, SEQ ID NO: 601, SEQ ID NO: 602, SEQ ID NO: 603, SEQ ID NO: 604, SEQ ID NO: 605, SEQ ID NO: 606, SEQ ID NO: 607, SEQ ID NO: 608, SEQ ID NO: 609, SEQ ID NO: 610, SEQ ID NO: 611, SEQ ID NO: 612, SEQ ID NO: 613, SEQ ID NO: 614, SEQ ID NO: 615, SEQ ID NO: 616, SEQ ID NO: 617, SEQ ID NO: 618, SEQ ID NO: 619, SEQ ID NO: 620, SEQ ID NO: 621, SEQ ID NO: 622, SEQ ID NO: 623, SEQ ID NO: 624, SEQ ID NO: 625, SEQ ID NO: 626, SEQ ID NO: 627, SEQ ID NO: 628, SEQ ID NO: 629, SEQ ID NO: 630, SEQ ID NO: 631, SEQ ID NO: 632, SEQ ID NO: 633, SEQ ID NO: 634, SEQ ID NO: 635, SEQ ID NO: 636, SEQ ID NO: 637, SEQ ID NO: 638, SEQ ID NO: 639, SEQ ID NO: 640, SEQ ID NO: 641, SEQ ID NO: 642, SEQ ID NO: 643, SEQ ID NO: 644, SEQ ID NO: 645, SEQ ID NO: 646, SEQ ID NO: 647, SEQ ID NO: 648, SEQ ID NO: 649, SEQ ID NO: 650, SEQ ID NO: 651, SEQ ID NO: 652, SEQ ID NO: 653, SEQ ID NO: 654, SEQ ID NO: 655, SEQ ID NO: 656, SEQ ID NO: 657, SEQ ID NO: 658, SEQ ID NO: 659, SEQ ID NO: 660, SEQ ID NO: 661, SEQ ID NO: 662, SEQ ID NO: 663, SEQ ID NO: 664, SEQ ID NO: 665, SEQ ID NO: 666, SEQ ID NO: 667, SEQ ID NO: 668, SEQ ID NO: 669, SEQ ID NO: 670, SEQ ID NO: 671, SEQ ID NO: 672, SEQ ID NO: 673, SEQ ID NO: 674, SEQ ID NO: 675, SEQ ID NO: 676, SEQ ID NO: 677, SEQ ID NO: 678, SEQ ID NO: 679, SEQ ID NO: 680, SEQ ID NO: 681, SEQ ID NO: 682, SEQ ID NO: 683, SEQ ID NO: 684, SEQ ID NO: 685, SEQ ID NO: 686, SEQ ID NO: 687, SEQ ID NO: 688, SEQ ID NO: 689, SEQ ID NO: 690, SEQ ID NO: 691, SEQ ID NO: 692, SEQ ID NO: 693, SEQ ID NO: 694, SEQ ID NO: 695, or SEQ ID NO: 696.

[0733] In some examples of any of the ABPCs described herein, the first antigen-binding domain includes a light chain variable domain comprising SEQ ID NO: 771, and a heavy chain variable domain comprising: SEQ ID NO: 502, SEQ ID NO: 510, SEQ ID NO: 511, SEQ ID NO: 512, SEQ ID NO: 513, SEQ ID NO: 514, SEQ ID NO: 515, SEQ ID NO: 516, SEQ ID NO: 517, SEQ ID NO: 518, SEQ ID NO: 519, SEQ ID NO: 520, SEQ ID NO: 521, SEQ ID NO: 522, SEQ ID NO: 523, SEQ ID NO: 524, SEQ ID NO: 525, SEQ ID NO: 526, SEQ ID NO: 527, SEQ ID NO: 528, SEQ ID NO: 529, SEQ ID NO: 530, SEQ ID NO: 531, SEQ ID NO: 532, SEQ ID NO: 533, SEQ ID NO: 534, SEQ ID NO: 535, SEQ ID NO: 536, SEQ ID NO: 537, SEQ ID NO: 538, SEQ ID NO: 539, SEQ ID NO: 540, SEQ ID NO: 541, SEQ ID NO: 542, SEQ ID NO: 543, SEQ ID NO: 544, SEQ ID NO: 545, SEQ ID NO: 546, SEQ ID NO: 547, SEQ ID NO: 548, SEQ ID NO: 577, SEQ ID NO: 578, SEQ ID NO: 579, SEQ ID NO: 580, SEQ ID NO: 581, SEQ ID NO: 582, SEQ ID NO: 583, SEQ ID NO: 584, SEQ ID NO: 585, SEQ ID NO: 586, SEQ ID NO: 587, SEQ ID NO: 588, SEQ ID NO: 589, SEQ ID NO: 590, SEQ ID NO: 591, SEQ ID NO: 592, SEQ ID NO: 593, SEQ ID NO: 594, SEQ ID NO: 595, SEQ ID NO: 596, SEQ ID NO: 597, SEQ ID NO: 598, SEQ ID NO: 599, SEQ ID NO: 600, SEQ ID NO: 601, SEQ ID NO: 602, SEQ ID NO: 603, SEQ ID NO: 604, SEQ ID NO: 605, SEQ ID NO: 606, SEQ ID NO: 607, SEQ ID NO: 608, SEQ ID NO: 609, SEQ ID NO: 610, SEQ ID NO: 611, SEQ ID NO: 612, SEQ ID NO: 613, SEQ ID NO: 614, SEQ ID NO: 615, SEQ ID NO: 616, SEQ ID NO: 617, SEQ ID NO: 618, SEQ ID NO: 619, SEQ ID NO: 620, SEQ ID NO: 621, SEQ ID NO: 622, SEQ ID NO: 623, SEQ ID NO: 624, SEQ ID NO: 625, SEQ ID NO: 626, SEQ ID NO: 627, SEQ ID NO: 628, SEQ ID NO: 629, SEQ ID NO: 630, SEQ ID NO: 631, SEQ ID NO: 632, SEQ ID NO: 633, SEQ ID NO: 634, SEQ ID NO: 635, SEQ ID NO: 636, SEQ ID NO: 637, SEQ ID NO: 638, SEQ ID NO: 639, SEQ ID NO: 640, SEQ ID NO: 641, SEQ ID NO: 642, SEQ ID NO: 643, SEQ ID NO: 644, SEQ ID NO: 645, SEQ ID NO: 646, SEQ ID NO: 647, SEQ ID NO: 648, SEQ ID NO: 649, SEQ ID NO: 650, SEQ ID NO: 651, SEQ ID NO: 652, SEQ ID NO: 653, SEQ ID NO: 654, SEQ ID NO: 655, SEQ ID NO: 656, SEQ ID NO: 657, SEQ ID NO: 658, SEQ ID NO: 659, SEQ ID NO: 660, SEQ ID NO: 661, SEQ ID NO: 662, SEQ ID NO: 663, SEQ ID NO: 664, SEQ ID NO: 665, SEQ ID NO: 666, SEQ ID NO: 667, SEQ ID NO: 668, SEQ ID NO: 669, SEQ ID NO: 670, SEQ ID NO: 671, SEQ ID NO: 672, SEQ ID NO: 673, SEQ ID NO: 674, SEQ ID NO: 675, SEQ ID NO: 676, SEQ ID NO: 677, SEQ ID NO: 678, SEQ ID NO: 679, SEQ ID NO: 680, SEQ ID NO: 681, SEQ ID NO: 682, SEQ ID NO: 683, SEQ ID NO: 684, SEQ ID NO: 685, SEQ ID NO: 686, SEQ ID NO: 687, SEQ ID NO: 688, SEQ ID NO: 689, SEQ ID NO: 690, SEQ ID NO: 691, SEQ ID NO: 692, SEQ ID NO: 693, SEQ ID NO: 694, SEQ ID NO: 695, or SEQ ID NO: 696.

[0734] In some examples of any of the ABPCs described herein, the first antigen-binding domain includes a light chain variable domain comprising SEQ ID NO: 772, and a heavy chain variable domain comprising: SEQ ID NO: 502, SEQ ID NO: 510, SEQ ID NO: 511, SEQ ID NO: 512, SEQ ID NO: 513, SEQ ID NO: 514, SEQ ID NO: 515, SEQ ID NO: 516, SEQ ID NO: 517, SEQ ID NO: 518, SEQ ID NO: 519, SEQ ID NO: 520, SEQ ID NO: 521, SEQ ID NO: 522, SEQ ID NO: 523, SEQ ID NO: 524, SEQ ID NO: 525, SEQ ID NO: 526, SEQ ID NO: 527, SEQ ID NO: 528, SEQ ID NO: 529, SEQ ID NO: 530, SEQ ID NO: 531, SEQ ID NO: 532, SEQ ID NO: 533, SEQ ID NO: 534, SEQ ID NO: 535, SEQ ID NO: 536, SEQ ID NO: 537, SEQ ID NO: 538, SEQ ID NO: 539, SEQ ID NO: 540, SEQ ID NO: 541, SEQ ID NO: 542, SEQ ID NO: 543, SEQ ID NO: 544, SEQ ID NO: 545, SEQ ID NO: 546, SEQ ID NO: 547, SEQ ID NO: 548, SEQ ID NO: 577, SEQ ID NO: 578, SEQ ID NO: 579, SEQ ID NO: 580, SEQ ID NO: 581, SEQ ID NO: 582, SEQ ID NO: 583, SEQ ID NO: 584, SEQ ID NO: 585, SEQ ID NO: 586, SEQ ID NO: 587, SEQ ID NO: 588, SEQ ID NO: 589, SEQ ID NO: 590, SEQ ID NO: 591, SEQ ID NO: 592, SEQ ID NO: 593, SEQ ID NO: 594, SEQ ID NO: 595, SEQ ID NO: 596, SEQ ID NO: 597, SEQ ID NO: 598, SEQ ID NO: 599, SEQ ID NO: 600, SEQ ID NO: 601, SEQ ID NO: 602, SEQ ID NO: 603, SEQ ID NO: 604, SEQ ID NO: 605, SEQ ID NO: 606, SEQ ID NO: 607, SEQ ID NO: 608, SEQ ID NO: 609, SEQ ID NO: 610, SEQ ID NO: 611, SEQ ID NO: 612, SEQ ID NO: 613, SEQ ID NO: 614, SEQ ID NO: 615, SEQ ID NO: 616, SEQ ID NO: 617, SEQ ID NO: 618, SEQ ID NO: 619, SEQ ID NO: 620, SEQ ID NO: 621, SEQ ID NO: 622, SEQ ID NO: 623, SEQ ID NO: 624, SEQ ID NO: 625, SEQ ID NO: 626, SEQ ID NO: 627, SEQ ID NO: 628, SEQ ID NO: 629, SEQ ID NO: 630, SEQ ID NO: 631, SEQ ID NO: 632, SEQ ID NO: 633, SEQ ID NO: 634, SEQ ID NO: 635, SEQ ID NO: 636, SEQ ID NO: 637, SEQ ID NO: 638, SEQ ID NO: 639, SEQ ID NO: 640, SEQ ID NO: 641, SEQ ID NO: 642, SEQ ID NO: 643, SEQ ID NO: 644, SEQ ID NO: 645, SEQ ID NO: 646, SEQ ID NO: 647, SEQ ID NO: 648, SEQ ID NO: 649, SEQ ID NO: 650, SEQ ID NO: 651, SEQ ID NO: 652, SEQ ID NO: 653, SEQ ID NO: 654, SEQ ID NO: 655, SEQ ID NO: 656, SEQ ID NO: 657, SEQ ID NO: 658, SEQ ID NO: 659, SEQ ID NO: 660, SEQ ID NO: 661, SEQ ID NO: 662, SEQ ID NO: 663, SEQ ID NO: 664, SEQ ID NO: 665, SEQ ID NO: 666, SEQ ID NO: 667, SEQ ID NO: 668, SEQ ID NO: 669, SEQ ID NO: 670, SEQ ID NO: 671, SEQ ID NO: 672, SEQ ID NO: 673, SEQ ID NO: 674, SEQ ID NO: 675, SEQ ID NO: 676, SEQ ID NO: 677, SEQ ID NO: 678, SEQ ID NO: 679, SEQ ID NO: 680, SEQ ID NO: 681, SEQ ID NO: 682, SEQ ID NO: 683, SEQ ID NO: 684, SEQ ID NO: 685, SEQ ID NO: 686, SEQ ID NO: 687, SEQ ID NO: 688, SEQ ID NO: 689, SEQ ID NO: 690, SEQ ID NO: 691, SEQ ID NO: 692, SEQ ID NO: 693, SEQ ID NO: 694, SEQ ID NO: 695, or SEQ ID NO: 696.

[0735] In some examples of any of the ABPCs described herein, the first antigen-binding domain includes a light chain variable domain comprising SEQ ID NO: 773, and a heavy chain variable domain comprising: SEQ ID NO: 502, SEQ ID NO: 510, SEQ ID NO: 511, SEQ ID NO: 512, SEQ ID NO: 513, SEQ ID NO: 514, SEQ ID NO: 515, SEQ ID NO: 516, SEQ ID NO: 517, SEQ ID NO: 518, SEQ ID NO: 519, SEQ ID NO: 520, SEQ ID NO: 521, SEQ ID NO: 522, SEQ ID NO: 523, SEQ ID NO: 524, SEQ ID NO: 525, SEQ ID NO: 526, SEQ ID NO: 527, SEQ ID NO: 528, SEQ ID NO: 529, SEQ ID NO: 530, SEQ ID NO: 531, SEQ ID NO: 532, SEQ ID NO: 533, SEQ ID NO: 534, SEQ ID NO: 535, SEQ ID NO: 536, SEQ ID NO: 537, SEQ ID NO: 538, SEQ ID NO: 539, SEQ ID NO: 540, SEQ ID NO: 541, SEQ ID NO: 542, SEQ ID NO: 543, SEQ ID NO: 544, SEQ ID NO: 545, SEQ ID NO: 546, SEQ ID NO: 547, SEQ ID NO: 548, SEQ ID NO: 577, SEQ ID NO: 578, SEQ ID NO: 579, SEQ ID NO: 580, SEQ ID NO: 581, SEQ ID NO: 582, SEQ ID NO: 583, SEQ ID NO: 584, SEQ ID NO: 585, SEQ ID NO: 586, SEQ ID NO: 587, SEQ ID NO: 588, SEQ ID NO: 589, SEQ ID NO: 590, SEQ ID NO: 591, SEQ ID NO: 592, SEQ ID NO: 593, SEQ ID NO: 594, SEQ ID NO: 595, SEQ ID NO: 596, SEQ ID NO: 597, SEQ ID NO: 598, SEQ ID NO: 599, SEQ ID NO: 600, SEQ ID NO: 601, SEQ ID NO: 602, SEQ ID NO: 603, SEQ ID NO: 604, SEQ ID NO: 605, SEQ ID NO: 606, SEQ ID NO: 607, SEQ ID NO: 608, SEQ ID NO: 609, SEQ ID NO: 610, SEQ ID NO: 611, SEQ ID NO: 612, SEQ ID NO: 613, SEQ ID NO: 614, SEQ ID NO: 615, SEQ ID NO: 616, SEQ ID NO: 617, SEQ ID NO: 618, SEQ ID NO: 619, SEQ ID NO: 620, SEQ ID NO: 621, SEQ ID NO: 622, SEQ ID NO: 623, SEQ ID NO: 624, SEQ ID NO: 625, SEQ ID NO: 626, SEQ ID NO: 627, SEQ ID NO: 628, SEQ ID NO: 629, SEQ ID NO: 630, SEQ ID NO: 631, SEQ ID NO: 632, SEQ ID NO: 633, SEQ ID NO: 634, SEQ ID NO: 635, SEQ ID NO: 636, SEQ ID NO: 637, SEQ ID NO: 638, SEQ ID NO: 639, SEQ ID NO: 640, SEQ ID NO: 641, SEQ ID NO: 642, SEQ ID NO: 643, SEQ ID NO: 644, SEQ ID NO: 645, SEQ ID NO: 646, SEQ ID NO: 647, SEQ ID NO: 648, SEQ ID NO: 649, SEQ ID NO: 650, SEQ ID NO: 651, SEQ ID NO: 652, SEQ ID NO: 653, SEQ ID NO: 654, SEQ ID NO: 655, SEQ ID NO: 656, SEQ ID NO: 657, SEQ ID NO: 658, SEQ ID NO: 659, SEQ ID NO: 660, SEQ ID NO: 661, SEQ ID NO: 662, SEQ ID NO: 663, SEQ ID NO: 664, SEQ ID NO: 665, SEQ ID NO: 666, SEQ ID NO: 667, SEQ ID NO: 668, SEQ ID NO: 669, SEQ ID NO: 670, SEQ ID NO: 671, SEQ ID NO: 672, SEQ ID NO: 673, SEQ ID NO: 674, SEQ ID NO: 675, SEQ ID NO: 676, SEQ ID NO: 677, SEQ ID NO: 678, SEQ ID NO: 679, SEQ ID NO: 680, SEQ ID NO: 681, SEQ ID NO: 682, SEQ ID NO: 683, SEQ ID NO: 684, SEQ ID NO: 685, SEQ ID NO: 686, SEQ ID NO: 687, SEQ ID NO: 688, SEQ ID NO: 689, SEQ ID NO: 690, SEQ ID NO: 691, SEQ ID NO: 692, SEQ ID NO: 693, SEQ ID NO: 694, SEQ ID NO: 695, or SEQ ID NO: 696.

[0736] In some examples of any of the ABPCs described herein, the first antigen-binding domain includes a light chain variable domain comprising SEQ ID NO: 774, and a heavy chain variable domain comprising: SEQ ID NO: 502, SEQ ID NO: 510, SEQ ID NO: 511, SEQ ID NO: 512, SEQ ID NO: 513, SEQ ID NO: 514, SEQ ID NO: 515, SEQ ID NO: 516, SEQ ID NO: 517, SEQ ID NO: 518, SEQ ID NO: 519, SEQ ID NO: 520, SEQ ID NO: 521, SEQ ID NO: 522, SEQ ID NO: 523, SEQ ID NO: 524, SEQ ID NO: 525, SEQ ID NO: 526, SEQ ID NO: 527, SEQ ID NO: 528, SEQ ID NO: 529, SEQ ID NO: 530, SEQ ID NO: 531, SEQ ID NO: 532, SEQ ID NO: 533, SEQ ID NO: 534, SEQ ID NO: 535, SEQ ID NO: 536, SEQ ID NO: 537, SEQ ID NO: 538, SEQ ID NO: 539, SEQ ID NO: 540, SEQ ID NO: 541, SEQ ID NO: 542, SEQ ID NO: 543, SEQ ID NO: 544, SEQ ID NO: 545, SEQ ID NO: 546, SEQ ID NO: 547, SEQ ID NO: 548, SEQ ID NO: 577, SEQ ID NO: 578, SEQ ID NO: 579, SEQ ID NO: 580, SEQ ID NO: 581, SEQ ID NO: 582, SEQ ID NO: 583, SEQ ID NO: 584, SEQ ID NO: 585, SEQ ID NO: 586, SEQ ID NO: 587, SEQ ID NO: 588, SEQ ID NO: 589, SEQ ID NO: 590, SEQ ID NO: 591, SEQ ID NO: 592, SEQ ID NO: 593, SEQ ID NO: 594, SEQ ID NO: 595, SEQ ID NO: 596, SEQ ID NO: 597, SEQ ID NO: 598, SEQ ID NO: 599, SEQ ID NO: 600, SEQ ID NO: 601, SEQ ID NO: 602, SEQ ID NO: 603, SEQ ID NO: 604, SEQ ID NO: 605, SEQ ID NO: 606, SEQ ID NO: 607, SEQ ID NO: 608, SEQ ID NO: 609, SEQ ID NO: 610, SEQ ID NO: 611, SEQ ID NO: 612, SEQ ID NO: 613, SEQ ID NO: 614, SEQ ID NO: 615, SEQ ID NO: 616, SEQ ID NO: 617, SEQ ID NO: 618, SEQ ID NO: 619, SEQ ID NO: 620, SEQ ID NO: 621, SEQ ID NO: 622, SEQ ID NO: 623, SEQ ID NO: 624, SEQ ID NO: 625, SEQ ID NO: 626, SEQ ID NO: 627, SEQ ID NO: 628, SEQ ID NO: 629, SEQ ID NO: 630, SEQ ID NO: 631, SEQ ID NO: 632, SEQ ID NO: 633, SEQ ID NO: 634, SEQ ID NO: 635, SEQ ID NO: 636, SEQ ID NO: 637, SEQ ID NO: 638, SEQ ID NO: 639, SEQ ID NO: 640, SEQ ID NO: 641, SEQ ID NO: 642, SEQ ID NO: 643, SEQ ID NO: 644, SEQ ID NO: 645, SEQ ID NO: 646, SEQ ID NO: 647, SEQ ID NO: 648, SEQ ID NO: 649, SEQ ID NO: 695, or SEQ ID NO: 696. In some examples of any of the ABPCs described herein, the first antigen-binding domain includes a light chain variable domain comprising SEQ ID NO: 775, and a heavy chain variable domain comprising: SEQ ID NO: 502, SEQ ID NO: 510, SEQ ID NO: 511, SEQ ID NO: 512, SEQ ID NO: 513, SEQ ID NO: 514, SEQ ID NO: 515, SEQ ID NO: 516, SEQ ID NO: 517, SEQ ID NO: 518, SEQ ID NO: 519, SEQ ID NO: 520, SEQ ID NO: 521, SEQ ID NO: 522, SEQ ID NO: 523, SEQ ID NO: 524, SEQ ID NO: 525, SEQ ID NO: 526, SEQ ID NO: 527, SEQ ID NO: 528, SEQ ID NO: 529, SEQ ID NO: 530, SEQ ID NO: 531, SEQ ID NO: 532, SEQ ID NO: 533, SEQ ID NO: 534, SEQ ID NO: 535, SEQ ID NO: 536, SEQ ID NO: 537, SEQ ID NO: 538, SEQ ID NO: 539, SEQ ID NO: 540, SEQ ID NO: 541, SEQ ID NO: 542, SEQ ID NO: 543, SEQ ID NO: 544, SEQ ID NO: 545, SEQ ID NO: 546, SEQ ID NO: 547, SEQ ID NO: 548, SEQ ID NO: 577, SEQ ID NO: 578, SEQ ID NO: 579, SEQ ID NO: 580, SEQ ID NO: 581, SEQ ID NO: 582, SEQ ID NO: 583, SEQ ID NO: 584, SEQ ID NO: 585, SEQ ID NO: 586, SEQ ID NO: 587, SEQ ID NO: 588, SEQ ID NO: 589, SEQ ID NO: 590, SEQ ID NO: 591, SEQ ID NO: 592, SEQ ID NO: 593, SEQ ID NO: 594, SEQ ID NO: 595, SEQ ID NO: 596, SEQ ID NO: 597, SEQ ID NO: 598, SEQ ID NO: 599, SEQ ID NO: 600, SEQ ID NO: 601, SEQ ID NO: 602, SEQ ID NO: 603, SEQ ID NO: 604, SEQ ID NO: 605, SEQ ID NO: 606, SEQ ID NO: 607, SEQ ID NO: 608, SEQ ID NO: 609, SEQ ID NO: 610, SEQ ID NO: 611, SEQ ID NO: 612, SEQ ID NO: 613, SEQ ID NO: 614, SEQ ID NO: 615, SEQ ID NO: 616, SEQ ID NO: 617, SEQ ID NO: 618, SEQ ID NO: 619, SEQ ID NO: 620, SEQ ID NO: 621, SEQ ID NO: 622, SEQ ID NO: 623, SEQ ID NO: 624, SEQ ID NO: 625, SEQ ID NO: 626, SEQ ID NO: 627, SEQ ID NO: 628, SEQ ID NO: 629, SEQ ID NO: 630, SEQ ID NO: 631, SEQ ID NO: 632, SEQ ID NO: 633, SEQ ID NO: 634, SEQ ID NO: 635, SEQ ID NO: 636, SEQ ID NO: 637, SEQ ID NO: 638, SEQ ID NO: 639, SEQ ID NO: 640, SEQ ID NO: 641, SEQ ID NO: 642, SEQ ID NO: 643, SEQ ID NO: 644, SEQ ID NO: 645, SEQ ID NO: 646, SEQ ID NO: 647, SEQ ID NO: 648, SEQ ID NO: 649, SEQ ID NO: 650, SEQ ID NO: 651, SEQ ID NO: 652, SEQ ID NO: 653, SEQ ID NO: 654, SEQ ID NO: 655, SEQ ID NO: 656, SEQ ID NO: 657, SEQ ID NO: 658, SEQ ID NO: 659, SEQ ID NO: 660, SEQ ID NO: 661, SEQ ID NO: 662, SEQ ID NO: 663, SEQ ID NO: 664, SEQ ID NO: 665, SEQ ID NO: 666, SEQ ID NO: 667, SEQ ID NO: 668, SEQ ID NO: 669, SEQ ID NO: 670, SEQ ID NO: 671, SEQ ID NO: 672, SEQ ID NO: 673, SEQ ID NO: 674, SEQ ID NO: 675, SEQ ID NO: 676, SEQ ID NO: 677, SEQ ID NO: 678, SEQ ID NO: 679, SEQ ID NO: 680, SEQ ID NO: 681, SEQ ID NO: 682, SEQ ID NO: 683, SEQ ID NO: 684, SEQ ID NO: 685, SEQ ID NO: 686, SEQ ID NO: 687, SEQ ID NO: 688, SEQ ID NO: 689, SEQ ID NO: 690, SEQ ID NO: 691, SEQ ID NO: 692, SEQ ID NO: 693, SEQ ID NO: 694, SEQ ID NO: 695, or SEQ ID NO: 696.

[0737] In some examples of any of the ABPCs described herein, the first antigen-binding domain includes a light chain variable domain comprising SEQ ID NO: 776, and a heavy chain variable domain comprising: SEQ ID NO: 502, SEQ ID NO: 510, SEQ ID NO: 511, SEQ ID NO: 512, SEQ ID NO: 513, SEQ ID NO: 514, SEQ ID NO: 515, SEQ ID NO: 516, SEQ ID NO: 517, SEQ ID NO: 518, SEQ ID NO: 519, SEQ ID NO: 520, SEQ ID NO: 521, SEQ ID NO: 522, SEQ ID NO: 523, SEQ ID NO: 524, SEQ ID NO: 525, SEQ ID NO: 526, SEQ ID NO: 527, SEQ ID NO: 528, SEQ ID NO: 529, SEQ ID NO: 530, SEQ ID NO: 531, SEQ ID NO: 532, SEQ ID NO: 533, SEQ ID NO: 534, SEQ ID NO: 535, SEQ ID NO: 536, SEQ ID NO: 537, SEQ ID NO: 538, SEQ ID NO: 539, SEQ ID NO: 540, SEQ ID NO: 541, SEQ ID NO: 542, SEQ ID NO: 543, SEQ ID NO: 544, SEQ ID NO: 545, SEQ ID NO: 546, SEQ ID NO: 547, SEQ ID NO: 548, SEQ ID NO: 577, SEQ ID NO: 578, SEQ ID NO: 579, SEQ ID NO: 580, SEQ ID NO: 581, SEQ ID NO: 582, SEQ ID NO: 583, SEQ ID NO: 584, SEQ ID NO: 585, SEQ ID NO: 586, SEQ ID NO: 587, SEQ ID NO: 588, SEQ ID NO: 589, SEQ ID NO: 590, SEQ ID NO: 591, SEQ ID NO: 592, SEQ ID NO: 593, SEQ ID NO: 594, SEQ ID NO: 595, SEQ ID NO: 596, SEQ ID NO: 597, SEQ ID NO: 598, SEQ ID NO: 599, SEQ ID NO: 600, SEQ ID NO: 601, SEQ ID NO: 602, SEQ ID NO: 603, SEQ ID NO: 604, SEQ ID NO: 605, SEQ ID NO: 606, SEQ ID NO: 607, SEQ ID NO: 608, SEQ ID NO: 609, SEQ ID NO: 610, SEQ ID NO: 611, SEQ ID NO: 612, SEQ ID NO: 613, SEQ ID NO: 614, SEQ ID NO: 615, SEQ ID NO: 616, SEQ ID NO: 617, SEQ ID NO: 618, SEQ ID NO: 619, SEQ ID NO: 620, SEQ ID NO: 621, SEQ ID NO: 622, SEQ ID NO: 623, SEQ ID NO: 624, SEQ ID NO: 625, SEQ ID NO: 626, SEQ ID NO: 627, SEQ ID NO: 628, SEQ ID NO: 629, SEQ ID NO: 630, SEQ ID NO: 631, SEQ ID NO: 632, SEQ ID NO: 633, SEQ ID NO: 634, SEQ ID NO: 635, SEQ ID NO: 636, SEQ ID NO: 637, SEQ ID NO: 638, SEQ ID NO: 639, SEQ ID NO: 640, SEQ ID NO: 641, SEQ ID NO: 642, SEQ ID NO: 643, SEQ ID NO: 644, SEQ ID NO: 645, SEQ ID NO: 646, SEQ ID NO: 647, SEQ ID NO: 648, SEQ ID NO: 649, SEQ ID NO: 650, SEQ ID NO: 651, SEQ ID NO: 652, SEQ ID NO: 653, SEQ ID NO: 654, SEQ ID NO: 655, SEQ ID NO: 656, SEQ ID NO: 657, SEQ ID NO: 658, SEQ ID NO: 659, SEQ ID NO: 660, SEQ ID NO: 661, SEQ ID NO: 662, SEQ ID NO: 663, SEQ ID NO: 664, SEQ ID NO: 665, SEQ ID NO: 666, SEQ ID NO: 667, SEQ ID NO: 668, SEQ ID NO: 669, SEQ ID NO: 670, SEQ ID NO: 671, SEQ ID NO: 672, SEQ ID NO: 673, SEQ ID NO: 674, SEQ ID NO: 675, SEQ ID NO: 676, SEQ ID NO: 677, SEQ ID NO: 678, SEQ ID NO: 679, SEQ ID NO: 680, SEQ ID NO: 681, SEQ ID NO: 682, SEQ ID NO: 683, SEQ ID NO: 684, SEQ ID NO: 685, SEQ ID NO: 686, SEQ ID NO: 687, SEQ ID NO: 688, SEQ ID NO: 689, SEQ ID NO: 690, SEQ ID NO: 691, SEQ ID NO: 692, SEQ ID NO: 693, SEQ ID NO: 694, SEQ ID NO: 695, or SEQ ID NO: 696.

[0738] In some examples of any of the ABPCs described herein, the first antigen-binding domain includes a light chain variable domain comprising SEQ ID NO: 777, and a heavy chain variable domain comprising: SEQ ID NO: 502, SEQ ID NO: 510, SEQ ID NO: 511, SEQ ID NO: 512, SEQ ID NO: 513, SEQ ID NO: 514, SEQ ID NO: 515, SEQ ID NO: 516, SEQ ID NO: 517, SEQ ID NO: 518, SEQ ID NO: 519, SEQ ID NO: 520, SEQ ID NO: 521, SEQ ID NO: 522, SEQ ID NO: 523, SEQ ID NO: 524, SEQ ID NO: 525, SEQ ID NO: 526, SEQ ID NO: 527, SEQ ID NO: 528, SEQ ID NO: 529, SEQ ID NO: 530, SEQ ID NO: 531, SEQ ID NO: 532, SEQ ID NO: 533, SEQ ID NO: 534, SEQ ID NO: 535, SEQ ID NO: 536, SEQ ID NO: 537, SEQ ID NO: 538, SEQ ID NO: 539, SEQ ID NO: 540, SEQ ID NO: 541, SEQ ID NO: 542, SEQ ID NO: 543, SEQ ID NO: 544, SEQ ID NO: 545, SEQ ID NO: 546, SEQ ID NO: 547, SEQ ID NO: 548, SEQ ID NO: 577, SEQ ID NO: 578, SEQ ID NO: 579, SEQ ID NO: 580, SEQ ID NO: 581, SEQ ID NO: 582, SEQ ID NO: 583, SEQ ID NO: 584, SEQ ID NO: 585, SEQ ID NO: 586, SEQ ID NO: 587, SEQ ID NO: 588, SEQ ID NO: 589, SEQ ID NO: 590, SEQ ID NO: 591, SEQ ID NO: 592, SEQ ID NO: 593, SEQ ID NO: 594, SEQ ID NO: 595, SEQ ID NO: 596, SEQ ID NO: 597, SEQ ID NO: 598, SEQ ID NO: 599, SEQ ID NO: 600, SEQ ID NO: 601, SEQ ID NO: 602, SEQ ID NO: 603, SEQ ID NO: 604, SEQ ID NO: 605, SEQ ID NO: 606, SEQ ID NO: 607, SEQ ID NO: 608, SEQ ID NO: 609, SEQ ID NO: 610, SEQ ID NO: 611, SEQ ID NO: 612, SEQ ID NO: 613, SEQ ID NO: 614, SEQ ID NO: 615, SEQ ID NO: 616, SEQ ID NO: 617, SEQ ID NO: 618, SEQ ID NO: 619, SEQ ID NO: 620, SEQ ID NO: 621, SEQ ID NO: 622, SEQ ID NO: 623, SEQ ID NO: 624, SEQ ID NO: 625, SEQ ID NO: 626, SEQ ID NO: 627, SEQ ID NO: 628, SEQ ID NO: 629, SEQ ID NO: 630, SEQ ID NO: 631, SEQ ID NO: 632, SEQ ID NO: 633, SEQ ID NO: 634, SEQ ID NO: 635, SEQ ID NO: 636, SEQ ID NO: 637, SEQ ID NO: 638, SEQ ID NO: 639, SEQ ID NO: 640, SEQ ID NO: 641, SEQ ID NO: 642, SEQ ID NO: 643, SEQ ID NO: 644, SEQ ID NO: 645, SEQ ID NO: 646, SEQ ID NO: 647, SEQ ID NO: 648, SEQ ID NO: 649, SEQ ID NO: 650, SEQ ID NO: 651, SEQ ID NO: 652, SEQ ID NO: 653, SEQ ID NO: 654, SEQ ID NO: 655, SEQ ID NO: 656, SEQ ID NO: 657, SEQ ID NO: 658, SEQ ID NO: 659, SEQ ID NO: 660, SEQ ID NO: 661, SEQ ID NO: 662, SEQ ID NO: 663, SEQ ID NO: 664, SEQ ID NO: 665, SEQ ID NO: 666, SEQ ID NO: 667, SEQ ID NO: 668, SEQ ID NO: 669, SEQ ID NO: 670, SEQ ID NO: 671, SEQ ID NO: 672, SEQ ID NO: 673, SEQ ID NO: 674, SEQ ID NO: 675, SEQ ID NO: 676, SEQ ID NO: 677, SEQ ID NO: 678, SEQ ID NO: 679, SEQ ID NO: 680, SEQ ID NO: 681, SEQ ID NO: 682, SEQ ID NO: 683, SEQ ID NO: 684, SEQ ID NO: 685, SEQ ID NO: 686, SEQ ID NO: 687, SEQ ID NO: 688, SEQ ID NO: 689, SEQ ID NO: 690, SEQ ID NO: 691, SEQ ID NO: 692, SEQ ID NO: 693, SEQ ID NO: 694, SEQ ID NO: 695, or SEQ ID NO: 696.

[0739] In some examples of any of the ABPCs described herein, the first antigen-binding domain includes a light chain variable domain comprising SEQ ID NO: 778, and a heavy chain variable domain comprising: SEQ ID NO: 502, SEQ ID NO: 510, SEQ ID NO: 511, SEQ ID NO: 512, SEQ ID NO: 513, SEQ ID NO: 514, SEQ ID NO: 515, SEQ ID NO: 516, SEQ ID NO: 517, SEQ ID NO: 518, SEQ ID NO: 519, SEQ ID NO: 520, SEQ ID NO: 521, SEQ ID NO: 522, SEQ ID NO: 523, SEQ ID NO: 524, SEQ ID NO: 525, SEQ ID NO: 526, SEQ ID NO: 527, SEQ ID NO: 528, SEQ ID NO: 529, SEQ ID NO: 530, SEQ ID NO: 531, SEQ ID NO: 532, SEQ ID NO: 533, SEQ ID NO: 534, SEQ ID NO: 535, SEQ ID NO: 536, SEQ ID NO: 537, SEQ ID NO: 538, SEQ ID NO: 539, SEQ ID NO: 540, SEQ ID NO: 541, SEQ ID NO: 542, SEQ ID NO: 543, SEQ ID NO: 544, SEQ ID NO: 545, SEQ ID NO: 546, SEQ ID NO: 547, SEQ ID NO: 548, SEQ ID NO: 577, SEQ ID NO: 578, SEQ ID NO: 579, SEQ ID NO: 580, SEQ ID NO: 581, SEQ ID NO: 582, SEQ ID NO: 583, SEQ ID NO: 584, SEQ ID NO: 585, SEQ ID NO: 586, SEQ ID NO: 587, SEQ ID NO: 588, SEQ ID NO: 589, SEQ ID NO: 590, SEQ ID NO: 591, SEQ ID NO: 592, SEQ ID NO: 593, SEQ ID NO: 594, SEQ ID NO: 595, SEQ ID NO: 596, SEQ ID NO: 597, SEQ ID NO: 598, SEQ ID NO: 599, SEQ ID NO: 600, SEQ ID NO: 601, SEQ ID NO: 602, SEQ ID NO: 603, SEQ ID NO: 604, SEQ ID NO: 605, SEQ ID NO: 606, SEQ ID NO: 607, SEQ ID NO: 608, SEQ ID NO: 609, SEQ ID NO: 610, SEQ ID NO: 611, SEQ ID NO: 612, SEQ ID NO: 613, SEQ ID NO: 614, SEQ ID NO: 615, SEQ ID NO: 616, SEQ ID NO: 617, SEQ ID NO: 618, SEQ ID NO: 619, SEQ ID NO: 620, SEQ ID NO: 621, SEQ ID NO: 622, SEQ ID NO: 623, SEQ ID NO: 624, SEQ ID NO: 625, SEQ ID NO: 626, SEQ ID NO: 627, SEQ ID NO: 628, SEQ ID NO: 629, SEQ ID NO: 630, SEQ ID NO: 631, SEQ ID NO: 632, SEQ ID NO: 633, SEQ ID NO: 634, SEQ ID NO: 635, SEQ ID NO: 636, SEQ ID NO: 637, SEQ ID NO: 638, SEQ ID NO: 639, SEQ ID NO: 640, SEQ ID NO: 641, SEQ ID NO: 642, SEQ ID NO: 643, SEQ ID NO: 644, SEQ ID NO: 645, SEQ ID NO: 646, SEQ ID NO: 647, SEQ ID NO: 648, SEQ ID NO: 649, SEQ ID NO: 650, SEQ ID NO: 651, SEQ ID NO: 652, SEQ ID NO: 653, SEQ ID NO: 654, SEQ ID NO: 655, SEQ ID NO: 656, SEQ ID NO: 657, SEQ ID NO: 658, SEQ ID NO: 659, SEQ ID NO: 660, SEQ ID NO: 661, SEQ ID NO: 662, SEQ ID NO: 663, SEQ ID NO: 664, SEQ ID NO: 665, SEQ ID NO: 666, SEQ ID NO: 667, SEQ ID NO: 668, SEQ ID NO: 669, SEQ ID NO: 670, SEQ ID NO: 671, SEQ ID NO: 672, SEQ ID NO: 673, SEQ ID NO: 674, SEQ ID NO: 675, SEQ ID NO: 676, SEQ ID NO: 677, SEQ ID NO: 678, SEQ ID NO: 679, SEQ ID NO: 680, SEQ ID NO: 681, SEQ ID NO: 682, SEQ ID NO: 683, SEQ ID NO: 684, SEQ ID NO: 685, SEQ ID NO: 686, SEQ ID NO: 687, SEQ ID NO: 688, SEQ ID NO: 689, SEQ ID NO: 690, SEQ ID NO: 691, SEQ ID NO: 692, SEQ ID NO: 693, SEQ ID NO: 694, SEQ ID NO: 695, or SEQ ID NO: 696.

[0740] In some examples of any of the ABPCs described herein, the first antigen-binding domain includes a light chain variable domain comprising SEQ ID NO: 779, and a heavy chain variable domain comprising: SEQ ID NO: 502, SEQ ID NO: 510, SEQ ID NO: 511, SEQ ID NO: 512, SEQ ID NO: 513, SEQ ID NO: 514, SEQ ID NO: 515, SEQ ID NO: 516, SEQ ID NO: 517, SEQ ID NO: 518, SEQ ID NO: 519, SEQ ID NO: 520, SEQ ID NO: 521, SEQ ID NO: 522, SEQ ID NO: 523, SEQ ID NO: 524, SEQ ID NO: 525, SEQ ID NO: 526, SEQ ID NO: 527, SEQ ID NO: 528, SEQ ID NO: 529, SEQ ID NO: 530, SEQ ID NO: 531, SEQ ID NO: 532, SEQ ID NO: 533, SEQ ID NO: 534, SEQ ID NO: 535, SEQ ID NO: 536, SEQ ID NO: 537, SEQ ID NO: 538, SEQ ID NO: 539, SEQ ID NO: 540, SEQ ID NO: 541, SEQ ID NO: 542, SEQ ID NO: 543, SEQ ID NO: 544, SEQ ID NO: 545, SEQ ID NO: 546, SEQ ID NO: 547, SEQ ID NO: 548, SEQ ID NO: 577, SEQ ID NO: 578, SEQ ID NO: 579, SEQ ID NO: 580, SEQ ID NO: 581, SEQ ID NO: 582, SEQ ID NO: 583, SEQ ID NO: 584, SEQ ID NO: 585, SEQ ID NO: 586, SEQ ID NO: 587, SEQ ID NO: 588, SEQ ID NO: 589, SEQ ID NO: 590, SEQ ID NO: 591, SEQ ID NO: 592, SEQ ID NO: 593, SEQ ID NO: 594, SEQ ID NO: 595, SEQ ID NO: 596, SEQ ID NO: 597, SEQ ID NO: 598, SEQ ID NO: 599, SEQ ID NO: 600, SEQ ID NO: 601, SEQ ID NO: 602, SEQ ID NO: 603, SEQ ID NO: 604, SEQ ID NO: 605, SEQ ID NO: 606, SEQ ID NO: 607, SEQ ID NO: 608, SEQ ID NO: 609, SEQ ID NO: 610, SEQ ID NO: 611, SEQ ID NO: 612, SEQ ID NO: 613, SEQ ID NO: 614, SEQ ID NO: 615, SEQ ID NO: 616, SEQ ID NO: 617, SEQ ID NO: 618, SEQ ID NO: 619, SEQ ID NO: 620, SEQ ID NO: 621, SEQ ID NO: 622, SEQ ID NO: 623, SEQ ID NO: 624, SEQ ID NO: 625, SEQ ID NO: 626, SEQ ID NO: 627, SEQ ID NO: 628, SEQ ID NO: 629, SEQ ID NO: 630, SEQ ID NO: 631, SEQ ID NO: 632, SEQ ID NO: 633, SEQ ID NO: 634, SEQ ID NO: 635, SEQ ID NO: 636, SEQ ID NO: 637, SEQ ID NO: 638, SEQ ID NO: 639, SEQ ID NO: 640, SEQ ID NO: 641, SEQ ID NO: 642, SEQ ID NO: 643, SEQ ID NO: 644, SEQ ID NO: 645, SEQ ID NO: 646, SEQ ID NO: 647, SEQ ID NO: 648, SEQ ID NO: 649, SEQ ID NO: 650, SEQ ID NO: 651, SEQ ID NO: 652, SEQ ID NO: 653, SEQ ID NO: 654, SEQ ID NO: 655, SEQ ID NO: 656, SEQ ID NO: 657, SEQ ID NO: 658, SEQ ID NO: 659, SEQ ID NO: 660, SEQ ID NO: 661, SEQ ID NO: 662, SEQ ID NO: 663, SEQ ID NO: 664, SEQ ID NO: 665, SEQ ID NO: 666, SEQ ID NO: 667, SEQ ID NO: 668, SEQ ID NO: 669, SEQ ID NO: 670, SEQ ID NO: 671, SEQ ID NO: 672, SEQ ID NO: 673, SEQ ID NO: 674, SEQ ID NO: 675, SEQ ID NO: 676, SEQ ID NO: 677, SEQ ID NO: 678, SEQ ID NO: 679, SEQ ID NO: 680, SEQ ID NO: 681, SEQ ID NO: 682, SEQ ID NO: 683, SEQ ID NO: 684, SEQ ID NO: 685, SEQ ID NO: 686, SEQ ID NO: 687, SEQ ID NO: 688, SEQ ID NO: 689, SEQ ID NO: 690, SEQ ID NO: 691, SEQ ID NO: 692, SEQ ID NO: 693, SEQ ID NO: 694, SEQ ID NO: 695, or SEQ ID NO: 696.

[0741] In some examples of any of the ABPCs described herein, the first antigen-binding domain includes a light chain variable domain comprising SEQ ID NO: 780, and a heavy chain variable domain comprising: SEQ ID NO: 502, SEQ ID NO: 510, SEQ ID NO: 511, SEQ ID NO: 512, SEQ ID NO: 513, SEQ ID NO: 514, SEQ ID NO: 515, SEQ ID NO: 516, SEQ ID NO: 517, SEQ ID NO: 518, SEQ ID NO: 519, SEQ ID NO: 520, SEQ ID NO: 521, SEQ ID NO: 522, SEQ ID NO: 523, SEQ ID NO: 524, SEQ ID NO: 525, SEQ ID NO: 526, SEQ ID NO: 527, SEQ ID NO: 528, SEQ ID NO: 529, SEQ ID NO: 530, SEQ ID NO: 531, SEQ ID NO: 532, SEQ ID NO: 533, SEQ ID NO: 534, SEQ ID NO: 535, SEQ ID NO: 536, SEQ ID NO: 537, SEQ ID NO: 538, SEQ ID NO: 539, SEQ ID NO: 540, SEQ ID NO: 541, SEQ ID NO: 542, SEQ ID NO: 543, SEQ ID NO: 544, SEQ ID NO: 545, SEQ ID NO: 546, SEQ ID NO: 547, SEQ ID NO: 548, SEQ ID NO: 577, SEQ ID NO: 578, SEQ ID NO: 579, SEQ ID NO: 580, SEQ ID NO: 581, SEQ ID NO: 582, SEQ ID NO: 583, SEQ ID NO: 584, SEQ ID NO: 585, SEQ ID NO: 586, SEQ ID NO: 587, SEQ ID NO: 588, SEQ ID NO: 589, SEQ ID NO: 590, SEQ ID NO: 591, SEQ ID NO: 592, SEQ ID NO: 593, SEQ ID NO: 594, SEQ ID NO: 595, SEQ ID NO: 596, SEQ ID NO: 597, SEQ ID NO: 598, SEQ ID NO: 599, SEQ ID NO: 600, SEQ ID NO: 601, SEQ ID NO: 602, SEQ ID NO: 603, SEQ ID NO: 604, SEQ ID NO: 605, SEQ ID NO: 606, SEQ ID NO: 607, SEQ ID NO: 608, SEQ ID NO: 609, SEQ ID NO: 610, SEQ ID NO: 611, SEQ ID NO: 612, SEQ ID NO: 613, SEQ ID NO: 614, SEQ ID NO: 615, SEQ ID NO: 616, SEQ ID NO: 617, SEQ ID NO: 618, SEQ ID NO: 619, SEQ ID NO: 620, SEQ ID NO: 621, SEQ ID NO: 622, SEQ ID NO: 623, SEQ ID NO: 624, SEQ ID NO: 625, SEQ ID NO: 626, SEQ ID NO: 627, SEQ ID NO: 628, SEQ ID NO: 629, SEQ ID NO: 630, SEQ ID NO: 631, SEQ ID NO: 632, SEQ ID NO: 633, SEQ ID NO: 634, SEQ ID NO: 635, SEQ ID NO: 636, SEQ ID NO: 637, SEQ ID NO: 638, SEQ ID NO: 639, SEQ ID NO: 640, SEQ ID NO: 641, SEQ ID NO: 642, SEQ ID NO: 643, SEQ ID NO: 644, SEQ ID NO: 645, SEQ ID NO: 646, SEQ ID NO: 647, SEQ ID NO: 648, SEQ ID NO: 649, SEQ ID NO: 650, SEQ ID NO: 651, SEQ ID NO: 652, SEQ ID NO: 653, SEQ ID NO: 654, SEQ ID NO: 655, SEQ ID NO: 656, SEQ ID NO: 657, SEQ ID NO: 658, SEQ ID NO: 659, SEQ ID NO: 660, SEQ ID NO: 661, SEQ ID NO: 662, SEQ ID NO: 663, SEQ ID NO: 664, SEQ ID NO: 665, SEQ ID NO: 666, SEQ ID NO: 667, SEQ ID NO: 668, SEQ ID NO: 669, SEQ ID NO: 670, SEQ ID NO: 671, SEQ ID NO: 672, SEQ ID NO: 673, SEQ ID NO: 674, SEQ ID NO: 675, SEQ ID NO: 676, SEQ ID NO: 677, SEQ ID NO: 678, SEQ ID NO: 679, SEQ ID NO: 680, SEQ ID NO: 681, SEQ ID NO: 682, SEQ ID NO: 683, SEQ ID NO: 684, SEQ ID NO: 685, SEQ ID NO: 686, SEQ ID NO: 687, SEQ ID NO: 688, SEQ ID NO: 689, SEQ ID NO: 690, SEQ ID NO: 691, SEQ ID NO: 692, SEQ ID NO: 693, SEQ ID NO: 694, SEQ ID NO: 695, or SEQ ID NO: 696.

[0742] In some examples of any of the ABPCs described herein, the first antigen-binding domain includes a light chain variable domain comprising SEQ ID NO: 781, and a heavy chain variable domain comprising: SEQ ID NO: 502, SEQ ID NO: 510, SEQ ID NO: 511, SEQ ID NO: 512, SEQ ID NO: 513, SEQ ID NO: 514, SEQ ID NO: 515, SEQ ID NO: 516, SEQ ID NO: 517, SEQ ID NO: 518, SEQ ID NO: 519, SEQ ID NO: 520, SEQ ID NO: 521, SEQ ID NO: 522, SEQ ID NO: 523, SEQ ID NO: 524, SEQ ID NO: 525, SEQ ID NO: 526, SEQ ID NO: 527, SEQ ID NO: 528, SEQ ID NO: 529, SEQ ID NO: 530, SEQ ID NO: 531, SEQ ID NO: 532, SEQ ID NO: 533, SEQ ID NO: 534, SEQ ID NO: 535, SEQ ID NO: 536, SEQ ID NO: 537, SEQ ID NO: 538, SEQ ID NO: 539, SEQ ID NO: 540, SEQ ID NO: 541, SEQ ID NO: 542, SEQ ID NO: 543, SEQ ID NO: 544, SEQ ID NO: 545, SEQ ID NO: 546, SEQ ID NO: 547, SEQ ID NO: 548, SEQ ID NO: 577, SEQ ID NO: 578, SEQ ID NO: 579, SEQ ID NO: 580, SEQ ID NO: 581, SEQ ID NO: 582, SEQ ID NO: 583, SEQ ID NO: 584, SEQ ID NO: 585, SEQ ID NO: 586, SEQ ID NO: 587, SEQ ID NO: 588, SEQ ID NO: 589, SEQ ID NO: 590, SEQ ID NO: 591, SEQ ID NO: 592, SEQ ID NO: 593, SEQ ID NO: 594, SEQ ID NO: 595, SEQ ID NO: 596, SEQ ID NO: 597, SEQ ID NO: 598, SEQ ID NO: 599, SEQ ID NO: 600, SEQ ID NO: 601, SEQ ID NO: 602, SEQ ID NO: 603, SEQ ID NO: 604, SEQ ID NO: 605, SEQ ID NO: 606, SEQ ID NO: 607, SEQ ID NO: 608, SEQ ID NO: 609, SEQ ID NO: 610, SEQ ID NO: 611, SEQ ID NO: 612, SEQ ID NO: 613, SEQ ID NO: 614, SEQ ID NO: 615, SEQ ID NO: 616, SEQ ID NO: 617, SEQ ID NO: 618, SEQ ID NO: 619, SEQ ID NO: 620, SEQ ID NO: 621, SEQ ID NO: 622, SEQ ID NO: 623, SEQ ID NO: 624, SEQ ID NO: 625, SEQ ID NO: 626, SEQ ID NO: 627, SEQ ID NO: 628, SEQ ID NO: 629, SEQ ID NO: 630, SEQ ID NO: 631, SEQ ID NO: 632, SEQ ID NO: 633, SEQ ID NO: 634, SEQ ID NO: 635, SEQ ID NO: 636, SEQ ID NO: 637, SEQ ID NO: 638, SEQ ID NO: 639, SEQ ID NO: 640, SEQ ID NO: 641, SEQ ID NO: 642, SEQ ID NO: 643, SEQ ID NO: 644, SEQ ID NO: 645, SEQ ID NO: 646, SEQ ID NO: 647, SEQ ID NO: 648, SEQ ID NO: 649, SEQ ID NO: 650, SEQ ID NO: 651, SEQ ID NO: 652, SEQ ID NO: 653, SEQ ID NO: 654, SEQ ID NO: 655, SEQ ID NO: 656, SEQ ID NO: 657, SEQ ID NO: 658, SEQ ID NO: 659, SEQ ID NO: 660, SEQ ID NO: 661, SEQ ID NO: 662, SEQ ID NO: 663, SEQ ID NO: 664, SEQ ID NO: 665, SEQ ID NO: 666, SEQ ID NO: 667, SEQ ID NO: 668, SEQ ID NO: 669, SEQ ID NO: 670, SEQ ID NO: 671, SEQ ID NO: 672, SEQ ID NO: 673, SEQ ID NO: 674, SEQ ID NO: 675, SEQ ID NO: 676, SEQ ID NO: 677, SEQ ID NO: 678, SEQ ID NO: 679, SEQ ID NO: 680, SEQ ID NO: 681, SEQ ID NO: 682, SEQ ID NO: 683, SEQ ID NO: 684, SEQ ID NO: 685, SEQ ID NO: 686, SEQ ID NO: 687, SEQ ID NO: 688, SEQ ID NO: 689, SEQ ID NO: 690, SEQ ID NO: 691, SEQ ID NO: 692, SEQ ID NO: 693, SEQ ID NO: 694, SEQ ID NO: 695, or SEQ ID NO: 696.

[0743] In some examples of any of the ABPCs described herein, the first antigen-binding domain includes a light chain variable domain comprising SEQ ID NO: 782, and a heavy chain variable domain comprising: SEQ ID NO: 502, SEQ ID NO: 510, SEQ ID NO: 511, SEQ ID NO: 512, SEQ ID NO: 513, SEQ ID NO: 514, SEQ ID NO: 515, SEQ ID NO: 516, SEQ ID NO: 517, SEQ ID NO: 518, SEQ ID NO: 519, SEQ ID NO: 520, SEQ ID NO: 521, SEQ ID NO: 522, SEQ ID NO: 523, SEQ ID NO: 524, SEQ ID NO: 525, SEQ ID NO: 526, SEQ ID NO: 527, SEQ ID NO: 528, SEQ ID NO: 529, SEQ ID NO: 530, SEQ ID NO: 531, SEQ ID NO: 532, SEQ ID NO: 533, SEQ ID NO: 534, SEQ ID NO: 535, SEQ ID NO: 536, SEQ ID NO: 537, SEQ ID NO: 538, SEQ ID NO: 539, SEQ ID NO: 540, SEQ ID NO: 541, SEQ ID NO: 542, SEQ ID NO: 543, SEQ ID NO: 544, SEQ ID NO: 545, SEQ ID NO: 546, SEQ ID NO: 547, SEQ ID NO: 548, SEQ ID NO: 577, SEQ ID NO: 578, SEQ ID NO: 579, SEQ ID NO: 580, SEQ ID NO: 581, SEQ ID NO: 582, SEQ ID NO: 583, SEQ ID NO: 584, SEQ ID NO: 585, SEQ ID NO: 586, SEQ ID NO: 587, SEQ ID NO: 588, SEQ ID NO: 589, SEQ ID NO: 590, SEQ ID NO: 591, SEQ ID NO: 592, SEQ ID NO: 593, SEQ ID NO: 594, SEQ ID NO: 595, SEQ ID NO: 596, SEQ ID NO: 597, SEQ ID NO: 598, SEQ ID NO: 599, SEQ ID NO: 600, SEQ ID NO: 601, SEQ ID NO: 602, SEQ ID NO: 603, SEQ ID NO: 604, SEQ ID NO: 605, SEQ ID NO: 606, SEQ ID NO: 607, SEQ ID NO: 608, SEQ ID NO: 609, SEQ ID NO: 610, SEQ ID NO: 611, SEQ ID NO: 612, SEQ ID NO: 613, SEQ ID NO: 614, SEQ ID NO: 615, SEQ ID NO: 616, SEQ ID NO: 617, SEQ ID NO: 618, SEQ ID NO: 619, SEQ ID NO: 620, SEQ ID NO: 621, SEQ ID NO: 622, SEQ ID NO: 623, SEQ ID NO: 624, SEQ ID NO: 625, SEQ ID NO: 626, SEQ ID NO: 627, SEQ ID NO: 628, SEQ ID NO: 629, SEQ ID NO: 630, SEQ ID NO: 631, SEQ ID NO: 632, SEQ ID NO: 633, SEQ ID NO: 634, SEQ ID NO: 635, SEQ ID NO: 636, SEQ ID NO: 637, SEQ ID NO: 638, SEQ ID NO: 639, SEQ ID NO: 640, SEQ ID NO: 641, SEQ ID NO: 642, SEQ ID NO: 643, SEQ ID NO: 644, SEQ ID NO: 645, SEQ ID NO: 646, SEQ ID NO: 647, SEQ ID NO: 648, SEQ ID NO: 649, SEQ ID NO: 650, SEQ ID NO: 651, SEQ ID NO: 652, SEQ ID NO: 653, SEQ ID NO: 654, SEQ ID NO: 655, SEQ ID NO: 656, SEQ ID NO: 657, SEQ ID NO: 658, SEQ ID NO: 659, SEQ ID NO: 660, SEQ ID NO: 661, SEQ ID NO: 662, SEQ ID NO: 663, SEQ ID NO: 664, SEQ ID NO: 665, SEQ ID NO: 666, SEQ ID NO: 667, SEQ ID NO: 668, SEQ ID NO: 669, SEQ ID NO: 670, SEQ ID NO: 671, SEQ ID NO: 672, SEQ ID NO: 673, SEQ ID NO: 674, SEQ ID NO: 675, SEQ ID NO: 676, SEQ ID NO: 677, SEQ ID NO: 678, SEQ ID NO: 679, SEQ ID NO: 680, SEQ ID NO: 681, SEQ ID NO: 682, SEQ ID NO: 683, SEQ ID NO: 684, SEQ ID NO: 685, SEQ ID NO: 686, SEQ ID NO: 687, SEQ ID NO: 688, SEQ ID NO: 689, SEQ ID NO: 690, SEQ ID NO: 691, SEQ ID NO: 692, SEQ ID NO: 693, SEQ ID NO: 694, SEQ ID NO: 695, or SEQ ID NO: 696.

[0744] In some examples of any of the ABPCs described herein, the first antigen-binding domain includes a light chain variable domain comprising SEQ ID NO: 783, and a heavy chain variable domain comprising: SEQ ID NO: 502, SEQ ID NO: 510, SEQ ID NO: 511, SEQ ID NO: 512, SEQ ID NO: 513, SEQ ID NO: 514, SEQ ID NO: 515, SEQ ID NO: 516, SEQ ID NO: 517, SEQ ID NO: 518, SEQ ID NO: 519, SEQ ID NO: 520, SEQ ID NO: 521, SEQ ID NO: 522, SEQ ID NO: 523, SEQ ID NO: 524, SEQ ID NO: 525, SEQ ID NO: 526, SEQ ID NO: 527, SEQ ID NO: 528, SEQ ID NO: 529, SEQ ID NO: 530, SEQ ID NO: 531, SEQ ID NO: 532, SEQ ID NO: 533, SEQ ID NO: 534, SEQ ID NO: 535, SEQ ID NO: 536, SEQ ID NO: 537, SEQ ID NO: 538, SEQ ID NO: 539, SEQ ID NO: 540, SEQ ID NO: 541, SEQ ID NO: 542, SEQ ID NO: 543, SEQ ID NO: 544, SEQ ID NO: 545, SEQ ID NO: 546, SEQ ID NO: 547, SEQ ID NO: 548, SEQ ID NO: 577, SEQ ID NO: 578, SEQ ID NO: 579, SEQ ID NO: 580, SEQ ID NO: 581, SEQ ID NO: 582, SEQ ID NO: 583, SEQ ID NO: 584, SEQ ID NO: 585, SEQ ID NO: 586, SEQ ID NO: 587, SEQ ID NO: 588, SEQ ID NO: 589, SEQ ID NO: 590, SEQ ID NO: 591, SEQ ID NO: 592, SEQ ID NO: 593, SEQ ID NO: 594, SEQ ID NO: 595, SEQ ID NO: 596, SEQ ID NO: 597, SEQ ID NO: 598, SEQ ID NO: 599, SEQ ID NO: 600, SEQ ID NO: 601, SEQ ID NO: 602, SEQ ID NO: 603, SEQ ID NO: 604, SEQ ID NO: 605, SEQ ID NO: 606, SEQ ID NO: 607, SEQ ID NO: 608, SEQ ID NO: 609, SEQ ID NO: 610, SEQ ID NO: 611, SEQ ID NO: 612, SEQ ID NO: 613, SEQ ID NO: 614, SEQ ID NO: 615, SEQ ID NO: 616, SEQ ID NO: 617, SEQ ID NO: 618, SEQ ID NO: 619, SEQ ID NO: 620, SEQ ID NO: 621, SEQ ID NO: 622, SEQ ID NO: 623, SEQ ID NO: 624, SEQ ID NO: 625, SEQ ID NO: 626, SEQ ID NO: 627, SEQ ID NO: 628, SEQ ID NO: 629, SEQ ID NO: 630, SEQ ID NO: 631, SEQ ID NO: 632, SEQ ID NO: 633, SEQ ID NO: 634, SEQ ID NO: 635, SEQ ID NO: 636, SEQ ID NO: 637, SEQ ID NO: 638, SEQ ID NO: 639, SEQ ID NO: 640, SEQ ID NO: 641, SEQ ID NO: 642, SEQ ID NO: 643, SEQ ID NO: 644, SEQ ID NO: 645, SEQ ID NO: 646, SEQ ID NO: 647, SEQ ID NO: 648, SEQ ID NO: 649, SEQ ID NO: 650, SEQ ID NO: 651, SEQ ID NO: 652, SEQ ID NO: 653, SEQ ID NO: 654, SEQ ID NO: 655, SEQ ID NO: 656, SEQ ID NO: 657, SEQ ID NO: 658, SEQ ID NO: 659, SEQ ID NO: 660, SEQ ID NO: 661, SEQ ID NO: 662, SEQ ID NO: 663, SEQ ID NO: 664, SEQ ID NO: 665, SEQ ID NO: 666, SEQ ID NO: 667, SEQ ID NO: 668, SEQ ID NO: 669, SEQ ID NO: 670, SEQ ID NO: 671, SEQ ID NO: 672, SEQ ID NO: 673, SEQ ID NO: 674, SEQ ID NO: 675, SEQ ID NO: 676, SEQ ID NO: 677, SEQ ID NO: 678, SEQ ID NO: 679, SEQ ID NO: 680, SEQ ID NO: 681, SEQ ID NO: 682, SEQ ID NO: 683, SEQ ID NO: 684, SEQ ID NO: 685, SEQ ID NO: 686, SEQ ID NO: 687, SEQ ID NO: 688, SEQ ID NO: 689, SEQ ID NO: 690, SEQ ID NO: 691, SEQ ID NO: 692, SEQ ID NO: 693, SEQ ID NO: 694, SEQ ID NO: 695, or SEQ ID NO: 696.

[0745] In some examples of any of the ABPCs described herein, the first antigen-binding domain includes a light chain variable domain comprising SEQ ID NO: 784, and a heavy chain variable domain comprising: SEQ ID NO: 502, SEQ ID NO: 510, SEQ ID NO: 511, SEQ ID NO: 512, SEQ ID NO: 513, SEQ ID NO: 514, SEQ ID NO: 515, SEQ ID NO: 516, SEQ ID NO: 517, SEQ ID NO: 518, SEQ ID NO: 519, SEQ ID NO: 520, SEQ ID NO: 521, SEQ ID NO: 522, SEQ ID NO: 523, SEQ ID NO: 524, SEQ ID NO: 525, SEQ ID NO: 526, SEQ ID NO: 527, SEQ ID NO: 528, SEQ ID NO: 529, SEQ ID NO: 530, SEQ ID NO: 531, SEQ ID NO: 532, SEQ ID NO: 533, SEQ ID NO: 534, SEQ ID NO: 535, SEQ ID NO: 536, SEQ ID NO: 537, SEQ ID NO: 538, SEQ ID NO: 539, SEQ ID NO: 540, SEQ ID NO: 541, SEQ ID NO: 542, SEQ ID NO: 543, SEQ ID NO: 544, SEQ ID NO: 545, SEQ ID NO: 546, SEQ ID NO: 547, SEQ ID NO: 548, SEQ ID NO: 577, SEQ ID NO: 578, SEQ ID NO: 579, SEQ ID NO: 580, SEQ ID NO: 581, SEQ ID NO: 582, SEQ ID NO: 583, SEQ ID NO: 584, SEQ ID NO: 585, SEQ ID NO: 586, SEQ ID NO: 587, SEQ ID NO: 588, SEQ ID NO: 589, SEQ ID NO: 590, SEQ ID NO: 591, SEQ ID NO: 592, SEQ ID NO: 593, SEQ ID NO: 594, SEQ ID NO: 595, SEQ ID NO: 596, SEQ ID NO: 597, SEQ ID NO: 598, SEQ ID NO: 599, SEQ ID NO: 600, SEQ ID NO: 601, SEQ ID NO: 602, SEQ ID NO: 603, SEQ ID NO: 604, SEQ ID NO: 605, SEQ ID NO: 606, SEQ ID NO: 607, SEQ ID NO: 608, SEQ ID NO: 609, SEQ ID NO: 610, SEQ ID NO: 611, SEQ ID NO: 612, SEQ ID NO: 613, SEQ ID NO: 614, SEQ ID NO: 615, SEQ ID NO: 616, SEQ ID NO: 617, SEQ ID NO: 618, SEQ ID NO: 619, SEQ ID NO: 620, SEQ ID NO: 621, SEQ ID NO: 622, SEQ ID NO: 623, SEQ ID NO: 624, SEQ ID NO: 625, SEQ ID NO: 626, SEQ ID NO: 627, SEQ ID NO: 628, SEQ ID NO: 629, SEQ ID NO: 630, SEQ ID NO: 631, SEQ ID NO: 632, SEQ ID NO: 633, SEQ ID NO: 634, SEQ ID NO: 635, SEQ ID NO: 636, SEQ ID NO: 637, SEQ ID NO: 638, SEQ ID NO: 639, SEQ ID NO: 640, SEQ ID NO: 641, SEQ ID NO: 642, SEQ ID NO: 643, SEQ ID NO: 644, SEQ ID NO: 645, SEQ ID NO: 646, SEQ ID NO: 647, SEQ ID NO: 648, SEQ ID NO: 649, SEQ ID NO: 650, SEQ ID NO: 651, SEQ ID NO: 652, SEQ ID NO: 653, SEQ ID NO: 654, SEQ ID NO: 655, SEQ ID NO: 656, SEQ ID NO: 657, SEQ ID NO: 658, SEQ ID NO: 659, SEQ ID NO: 660, SEQ ID NO: 661, SEQ ID NO: 662, SEQ ID NO: 663, SEQ ID NO: 664, SEQ ID NO: 665, SEQ ID NO: 666, SEQ ID NO: 667, SEQ ID NO: 668, SEQ ID NO: 669, SEQ ID NO: 670, SEQ ID NO: 671, SEQ ID NO: 672, SEQ ID NO: 673, SEQ ID NO: 674, SEQ ID NO: 675, SEQ ID NO: 676, SEQ ID NO: 677, SEQ ID NO: 678, SEQ ID NO: 679, SEQ ID NO: 680, SEQ ID NO: 681, SEQ ID NO: 682, SEQ ID NO: 683, SEQ ID NO: 684, SEQ ID NO: 685, SEQ ID NO: 686, SEQ ID NO: 687, SEQ ID NO: 688, SEQ ID NO: 689, SEQ ID NO: 690, SEQ ID NO: 691, SEQ ID NO: 692, SEQ ID NO: 693, SEQ ID NO: 694, SEQ ID NO: 695, or SEQ ID NO: 696.

[0746] In some examples of any of the ABPCs described herein, the first antigen-binding domain includes a light chain variable domain comprising SEQ ID NO: 785, and a heavy chain variable domain comprising: SEQ ID NO: 502, SEQ ID NO: 510, SEQ ID NO: 511, SEQ ID NO: 512, SEQ ID NO: 513, SEQ ID NO: 514, SEQ ID NO: 515, SEQ ID NO: 516, SEQ ID NO: 517, SEQ ID NO: 518, SEQ ID NO: 519, SEQ ID NO: 520, SEQ ID NO: 521, SEQ ID NO: 522, SEQ ID NO: 523, SEQ ID NO: 524, SEQ ID NO: 525, SEQ ID NO: 526, SEQ ID NO: 527, SEQ ID NO: 528, SEQ ID NO: 529, SEQ ID NO: 530, SEQ ID NO: 531, SEQ ID NO: 532, SEQ ID NO: 533, SEQ ID NO: 534, SEQ ID NO: 535, SEQ ID NO: 536, SEQ ID NO: 537, SEQ ID NO: 538, SEQ ID NO: 539, SEQ ID NO: 540, SEQ ID NO: 541, SEQ ID NO: 542, SEQ ID NO: 543, SEQ ID NO: 544, SEQ ID NO: 545, SEQ ID NO: 546, SEQ ID NO: 547, SEQ ID NO: 548, SEQ ID NO: 577, SEQ ID NO: 578, SEQ ID NO: 579, SEQ ID NO: 580, SEQ ID NO: 581, SEQ ID NO: 582, SEQ ID NO: 583, SEQ ID NO: 584, SEQ ID NO: 585, SEQ ID NO: 586, SEQ ID NO: 587, SEQ ID NO: 588, SEQ ID NO: 589, SEQ ID NO: 590, SEQ ID NO: 591, SEQ ID NO: 592, SEQ ID NO: 593, SEQ ID NO: 594, SEQ ID NO: 595, SEQ ID NO: 596, SEQ ID NO: 597, SEQ ID NO: 598, SEQ ID NO: 599, SEQ ID NO: 600, SEQ ID NO: 601, SEQ ID NO: 602, SEQ ID NO: 603, SEQ ID NO: 604, SEQ ID NO: 605, SEQ ID NO: 606, SEQ ID NO: 607, SEQ ID NO: 608, SEQ ID NO: 609, SEQ ID NO: 610, SEQ ID NO: 611, SEQ ID NO: 612, SEQ ID NO: 613, SEQ ID NO: 614, SEQ ID NO: 615, SEQ ID NO: 616, SEQ ID NO: 617, SEQ ID NO: 618, SEQ ID NO: 619, SEQ ID NO: 620, SEQ ID NO: 621, SEQ ID NO: 622, SEQ ID NO: 623, SEQ ID NO: 624, SEQ ID NO: 625, SEQ ID NO: 626, SEQ ID NO: 627, SEQ ID NO: 628, SEQ ID NO: 629, SEQ ID NO: 630, SEQ ID NO: 631, SEQ ID NO: 632, SEQ ID NO: 633, SEQ ID NO: 634, SEQ ID NO: 635, SEQ ID NO: 636, SEQ ID NO: 637, SEQ ID NO: 638, SEQ ID NO: 639, SEQ ID NO: 640, SEQ ID NO: 641, SEQ ID NO: 642, SEQ ID NO: 643, SEQ ID NO: 644, SEQ ID NO: 645, SEQ ID NO: 646, SEQ ID NO: 647, SEQ ID NO: 648, SEQ ID NO: 649, SEQ ID NO: 650, SEQ ID NO: 651, SEQ ID NO: 652, SEQ ID NO: 653, SEQ ID NO: 654, SEQ ID NO: 655, SEQ ID NO: 656, SEQ ID NO: 657, SEQ ID NO: 658, SEQ ID NO: 659, SEQ ID NO: 660, SEQ ID NO: 661, SEQ ID NO: 662, SEQ ID NO: 663, SEQ ID NO: 664, SEQ ID NO: 665, SEQ ID NO: 666, SEQ ID NO: 667, SEQ ID NO: 668, SEQ ID NO: 669, SEQ ID NO: 670, SEQ ID NO: 671, SEQ ID NO: 672, SEQ ID NO: 673, SEQ ID NO: 674, SEQ ID NO: 675, SEQ ID NO: 676, SEQ ID NO: 677, SEQ ID NO: 678, SEQ ID NO: 679, SEQ ID NO: 680, SEQ ID NO: 681, SEQ ID NO: 682, SEQ ID NO: 683, SEQ ID NO: 684, SEQ ID NO: 685, SEQ ID NO: 686, SEQ ID NO: 687, SEQ ID NO: 688, SEQ ID NO: 689, SEQ ID NO: 690, SEQ ID NO: 691, SEQ ID NO: 692, SEQ ID NO: 693, SEQ ID NO: 694, SEQ ID NO: 695, or SEQ ID NO: 696.

[0747] In some examples of any of the ABPCs described herein, the first antigen-binding domain includes a light chain variable domain comprising SEQ ID NO: 786, and a heavy chain variable domain comprising: SEQ ID NO: 502, SEQ ID NO: 510, SEQ ID NO: 511, SEQ ID NO: 512, SEQ ID NO: 513, SEQ ID NO: 514, SEQ ID NO: 515, SEQ ID NO: 516, SEQ ID NO: 517, SEQ ID NO: 518, SEQ ID NO: 519, SEQ ID NO: 520, SEQ ID NO: 521, SEQ ID NO: 522, SEQ ID NO: 523, SEQ ID NO: 524, SEQ ID NO: 525, SEQ ID NO: 526, SEQ ID NO: 527, SEQ ID NO: 528, SEQ ID NO: 529, SEQ ID NO: 530, SEQ ID NO: 531, SEQ ID NO: 532, SEQ ID NO: 533, SEQ ID NO: 534, SEQ ID NO: 535, SEQ ID NO: 536, SEQ ID NO: 537, SEQ ID NO: 538, SEQ ID NO: 539, SEQ ID NO: 540, SEQ ID NO: 541, SEQ ID NO: 542, SEQ ID NO: 543, SEQ ID NO: 544, SEQ ID NO: 545, SEQ ID NO: 546, SEQ ID NO: 547, SEQ ID NO: 548, SEQ ID NO: 577, SEQ ID NO: 578, SEQ ID NO: 579, SEQ ID NO: 580, SEQ ID NO: 581, SEQ ID NO: 582, SEQ ID NO: 583, SEQ ID NO: 584, SEQ ID NO: 585, SEQ ID NO: 586, SEQ ID NO: 587, SEQ ID NO: 588, SEQ ID NO: 589, SEQ ID NO: 590, SEQ ID NO: 591, SEQ ID NO: 592, SEQ ID NO: 593, SEQ ID NO: 594, SEQ ID NO: 595, SEQ ID NO: 596, SEQ ID NO: 597, SEQ ID NO: 598, SEQ ID NO: 599, SEQ ID NO: 600, SEQ ID NO: 601, SEQ ID NO: 602, SEQ ID NO: 603, SEQ ID NO: 604, SEQ ID NO: 605, SEQ ID NO: 606, SEQ ID NO: 607, SEQ ID NO: 608, SEQ ID NO: 609, SEQ ID NO: 610, SEQ ID NO: 611, SEQ ID NO: 612, SEQ ID NO: 613, SEQ ID NO: 614, SEQ ID NO: 615, SEQ ID NO: 616, SEQ ID NO: 617, SEQ ID NO: 618, SEQ ID NO: 619, SEQ ID NO: 620, SEQ ID NO: 621, SEQ ID NO: 622, SEQ ID NO: 623, SEQ ID NO: 624, SEQ ID NO: 625, SEQ ID NO: 626, SEQ ID NO: 627, SEQ ID NO: 628, SEQ ID NO: 629, SEQ ID NO: 630, SEQ ID NO: 631, SEQ ID NO: 632, SEQ ID NO: 633, SEQ ID NO: 634, SEQ ID NO: 635, SEQ ID NO: 636, SEQ ID NO: 637, SEQ ID NO: 638, SEQ ID NO: 639, SEQ ID NO: 640, SEQ ID NO: 641, SEQ ID NO: 642, SEQ ID NO: 643, SEQ ID NO: 644, SEQ ID NO: 645, SEQ ID NO: 646, SEQ ID NO: 647, SEQ ID NO: 648, SEQ ID NO: 649, SEQ ID NO: 650, SEQ ID NO: 651, SEQ ID NO: 652, SEQ ID NO: 653, SEQ ID NO: 654, SEQ ID NO: 655, SEQ ID NO: 656, SEQ ID NO: 657, SEQ ID NO: 658, SEQ ID NO: 659, SEQ ID NO: 660, SEQ ID NO: 661, SEQ ID NO: 662, SEQ ID NO: 663, SEQ ID NO: 664, SEQ ID NO: 665, SEQ ID NO: 666, SEQ ID NO: 667, SEQ ID NO: 668, SEQ ID NO: 669, SEQ ID NO: 670, SEQ ID NO: 671, SEQ ID NO: 672, SEQ ID NO: 673, SEQ ID NO: 674, SEQ ID NO: 675, SEQ ID NO: 676, SEQ ID NO: 677, SEQ ID NO: 678, SEQ ID NO: 679, SEQ ID NO: 680, SEQ ID NO: 681, SEQ ID NO: 682, SEQ ID NO: 683, SEQ ID NO: 684, SEQ ID NO: 685, SEQ ID NO: 686, SEQ ID NO: 687, SEQ ID NO: 688, SEQ ID NO: 689, SEQ ID NO: 690, SEQ ID NO: 691, SEQ ID NO: 692, SEQ ID NO: 693, SEQ ID NO: 694, SEQ ID NO: 695, or SEQ ID NO: 696.

[0748] In some examples of any of the ABPCs described herein, the first antigen-binding domain includes a light chain variable domain comprising SEQ ID NO: 787, and a heavy chain variable domain comprising: SEQ ID NO: 502, SEQ ID NO: 510, SEQ ID NO: 511, SEQ ID NO: 512, SEQ ID NO: 513, SEQ ID NO: 514, SEQ ID NO: 515, SEQ ID NO: 516, SEQ ID NO: 517, SEQ ID NO: 518, SEQ ID NO: 519, SEQ ID NO: 520, SEQ ID NO: 521, SEQ ID NO: 522, SEQ ID NO: 523, SEQ ID NO: 524, SEQ ID NO: 525, SEQ ID NO: 526, SEQ ID NO: 527, SEQ ID NO: 528, SEQ ID NO: 529, SEQ ID NO: 530, SEQ ID NO: 531, SEQ ID NO: 532, SEQ ID NO: 533, SEQ ID NO: 534, SEQ ID NO: 535, SEQ ID NO: 536, SEQ ID NO: 537, SEQ ID NO: 538, SEQ ID NO: 539, SEQ ID NO: 540, SEQ ID NO: 541, SEQ ID NO: 542, SEQ ID NO: 543, SEQ ID NO: 544, SEQ ID NO: 545, SEQ ID NO: 546, SEQ ID NO: 547, SEQ ID NO: 548, SEQ ID NO: 577, SEQ ID NO: 578, SEQ ID NO: 579, SEQ ID NO: 580, SEQ ID NO: 581, SEQ ID NO: 582, SEQ ID NO: 583, SEQ ID NO: 584, SEQ ID NO: 585, SEQ ID NO: 586, SEQ ID NO: 587, SEQ ID NO: 588, SEQ ID NO: 589, SEQ ID NO: 590, SEQ ID NO: 591, SEQ ID NO: 592, SEQ ID NO: 593, SEQ ID NO: 594, SEQ ID NO: 595, SEQ ID NO: 596, SEQ ID NO: 597, SEQ ID NO: 598, SEQ ID NO: 599, SEQ ID NO: 600, SEQ ID NO: 601, SEQ ID NO: 602, SEQ ID NO: 603, SEQ ID NO: 604, SEQ ID NO: 605, SEQ ID NO: 606, SEQ ID NO: 607, SEQ ID NO: 608, SEQ ID NO: 609, SEQ ID NO: 610, SEQ ID NO: 611, SEQ ID NO: 612, SEQ ID NO: 613, SEQ ID NO: 614, SEQ ID NO: 615, SEQ ID NO: 616, SEQ ID NO: 617, SEQ ID NO: 618, SEQ ID NO: 619, SEQ ID NO: 620, SEQ ID NO: 621, SEQ ID NO: 622, SEQ ID NO: 623, SEQ ID NO: 624, SEQ ID NO: 625, SEQ ID NO: 626, SEQ ID NO: 627, SEQ ID NO: 628, SEQ ID NO: 629, SEQ ID NO: 630, SEQ ID NO: 631, SEQ ID NO: 632, SEQ ID NO: 633, SEQ ID NO: 634, SEQ ID NO: 635, SEQ ID NO: 636, SEQ ID NO: 637, SEQ ID NO: 638, SEQ ID NO: 639, SEQ ID NO: 640, SEQ ID NO: 641, SEQ ID NO: 642, SEQ ID NO: 643, SEQ ID NO: 644, SEQ ID NO: 645, SEQ ID NO: 646, SEQ ID NO: 647, SEQ ID NO: 648, SEQ ID NO: 649, SEQ ID NO: 650, SEQ ID NO: 651, SEQ ID NO: 652, SEQ ID NO: 653, SEQ ID NO: 654, SEQ ID NO: 655, SEQ ID NO: 656, SEQ ID NO: 657, SEQ ID NO: 658, SEQ ID NO: 659, SEQ ID NO: 660, SEQ ID NO: 661, SEQ ID NO: 662, SEQ ID NO: 663, SEQ ID NO: 664, SEQ ID NO: 665, SEQ ID NO: 666, SEQ ID NO: 667, SEQ ID NO: 668, SEQ ID NO: 669, SEQ ID NO: 670, SEQ ID NO: 671, SEQ ID NO: 672, SEQ ID NO: 673, SEQ ID NO: 674, SEQ ID NO: 675, SEQ ID NO: 676, SEQ ID NO: 677, SEQ ID NO: 678, SEQ ID NO: 679, SEQ ID NO: 680, SEQ ID NO: 681, SEQ ID NO: 682, SEQ ID NO: 683, SEQ ID NO: 684, SEQ ID NO: 685, SEQ ID NO: 686, SEQ ID NO: 687, SEQ ID NO: 688, SEQ ID NO: 689, SEQ ID NO: 690, SEQ ID NO: 691, SEQ ID NO: 692, SEQ ID NO: 693, SEQ ID NO: 694, SEQ ID NO: 695, or SEQ ID NO: 696.

[0749] In some examples of any of the ABPCs described herein, the first antigen-binding domain includes a light chain variable domain comprising SEQ ID NO: 788, and a heavy chain variable domain comprising: SEQ ID NO: 502, SEQ ID NO: 510, SEQ ID NO: 511, SEQ ID NO: 512, SEQ ID NO: 513, SEQ ID NO: 514, SEQ ID NO: 515, SEQ ID NO: 516, SEQ ID NO: 517, SEQ ID NO: 518, SEQ ID NO: 519, SEQ ID NO: 520, SEQ ID NO: 521, SEQ ID NO: 522, SEQ ID NO: 523, SEQ ID NO: 524, SEQ ID NO: 525, SEQ ID NO: 526, SEQ ID NO: 527, SEQ ID NO: 528, SEQ ID NO: 529, SEQ ID NO: 530, SEQ ID NO: 531, SEQ ID NO: 532, SEQ ID NO: 533, SEQ ID NO: 534, SEQ ID NO: 535, SEQ ID NO: 536, SEQ ID NO: 537, SEQ ID NO: 538, SEQ ID NO: 539, SEQ ID NO: 540, SEQ ID NO: 541, SEQ ID NO: 542, SEQ ID NO: 543, SEQ ID NO: 544, SEQ ID NO: 545, SEQ ID NO: 546, SEQ ID NO: 547, SEQ ID NO: 548, SEQ ID NO: 577, SEQ ID NO: 578, SEQ ID NO: 579, SEQ ID NO: 580, SEQ ID NO: 581, SEQ ID NO: 582, SEQ ID NO: 583, SEQ ID NO: 584, SEQ ID NO: 585, SEQ ID NO: 586, SEQ ID NO: 587, SEQ ID NO: 588, SEQ ID NO: 589, SEQ ID NO: 590, SEQ ID NO: 591, SEQ ID NO: 592, SEQ ID NO: 593, SEQ ID NO: 594, SEQ ID NO: 595, SEQ ID NO: 596, SEQ ID NO: 597, SEQ ID NO: 598, SEQ ID NO: 599, SEQ ID NO: 600, SEQ ID NO: 601, SEQ ID NO: 602, SEQ ID NO: 603, SEQ ID NO: 604, SEQ ID NO: 605, SEQ ID NO: 606, SEQ ID NO: 607, SEQ ID NO: 608, SEQ ID NO: 609, SEQ ID NO: 610, SEQ ID NO: 611, SEQ ID NO: 612, SEQ ID NO: 613, SEQ ID NO: 614, SEQ ID NO: 615, SEQ ID NO: 616, SEQ ID NO: 617, SEQ ID NO: 618, SEQ ID NO: 619, SEQ ID NO: 620, SEQ ID NO: 621, SEQ ID NO: 622, SEQ ID NO: 623, SEQ ID NO: 624, SEQ ID NO: 625, SEQ ID NO: 626, SEQ ID NO: 627, SEQ ID NO: 628, SEQ ID NO: 629, SEQ ID NO: 630, SEQ ID NO: 631, SEQ ID NO: 632, SEQ ID NO: 633, SEQ ID NO: 634, SEQ ID NO: 635, SEQ ID NO: 636, SEQ ID NO: 637, SEQ ID NO: 638, SEQ ID NO: 639, SEQ ID NO: 640, SEQ ID NO: 641, SEQ ID NO: 642, SEQ ID NO: 643, SEQ ID NO: 644, SEQ ID NO: 645, SEQ ID NO: 646, SEQ ID NO: 647, SEQ ID NO: 648, SEQ ID NO: 649, SEQ ID NO: 650, SEQ ID NO: 651, SEQ ID NO: 652, SEQ ID NO: 653, SEQ ID NO: 654, SEQ ID NO: 655, SEQ ID NO: 656, SEQ ID NO: 657, SEQ ID NO: 658, SEQ ID NO: 659, SEQ ID NO: 660, SEQ ID NO: 661, SEQ ID NO: 662, SEQ ID NO: 663, SEQ ID NO: 664, SEQ ID NO: 665, SEQ ID NO: 666, SEQ ID NO: 667, SEQ ID NO: 668, SEQ ID NO: 669, SEQ ID NO: 670, SEQ ID NO: 671, SEQ ID NO: 672, SEQ ID NO: 673, SEQ ID NO: 674, SEQ ID NO: 675, SEQ ID NO: 676, SEQ ID NO: 677, SEQ ID NO: 678, SEQ ID NO: 679, SEQ ID NO: 680, SEQ ID NO: 681, SEQ ID NO: 682, SEQ ID NO: 683, SEQ ID NO: 684, SEQ ID NO: 685, SEQ ID NO: 686, SEQ ID NO: 687, SEQ ID NO: 688, SEQ ID NO: 689, SEQ ID NO: 690, SEQ ID NO: 691, SEQ ID NO: 692, SEQ ID NO: 693, SEQ ID NO: 694, SEQ ID NO: 695, or SEQ ID NO: 696.

[0750] In some examples of any of the ABPCs described herein, the first antigen-binding domain includes a light chain variable domain comprising SEQ ID NO: 789, and a heavy chain variable domain comprising: SEQ ID NO: 502, SEQ ID NO: 510, SEQ ID NO: 511, SEQ ID NO: 512, SEQ ID NO: 513, SEQ ID NO: 514, SEQ ID NO: 515, SEQ ID NO: 516, SEQ ID NO: 517, SEQ ID NO: 518, SEQ ID NO: 519, SEQ ID NO: 520, SEQ ID NO: 521, SEQ ID NO: 522, SEQ ID NO: 523, SEQ ID NO: 524, SEQ ID NO: 525, SEQ ID NO: 526, SEQ ID NO: 527, SEQ ID NO: 528, SEQ ID NO: 529, SEQ ID NO: 530, SEQ ID NO: 531, SEQ ID NO: 532, SEQ ID NO: 533, SEQ ID NO: 534, SEQ ID NO: 535, SEQ ID NO: 536, SEQ ID NO: 537, SEQ ID NO: 538, SEQ ID NO: 539, SEQ ID NO: 540, SEQ ID NO: 541, SEQ ID NO: 542, SEQ ID NO: 543, SEQ ID NO: 544, SEQ ID NO: 545, SEQ ID NO: 546, SEQ ID NO: 547, SEQ ID NO: 548, SEQ ID NO: 577, SEQ ID NO: 578, SEQ ID NO: 579, SEQ ID NO: 580, SEQ ID NO: 581, SEQ ID NO: 582, SEQ ID NO: 583, SEQ ID NO: 584, SEQ ID NO: 585, SEQ ID NO: 586, SEQ ID NO: 587, SEQ ID NO: 588, SEQ ID NO: 589, SEQ ID NO: 590, SEQ ID NO: 591, SEQ ID NO: 592, SEQ ID NO: 593, SEQ ID NO: 594, SEQ ID NO: 595, SEQ ID NO: 596, SEQ ID NO: 597, SEQ ID NO: 598, SEQ ID NO: 599, SEQ ID NO: 600, SEQ ID NO: 601, SEQ ID NO: 602, SEQ ID NO: 603, SEQ ID NO: 604, SEQ ID NO: 605, SEQ ID NO: 606, SEQ ID NO: 607, SEQ ID NO: 608, SEQ ID NO: 609, SEQ ID NO: 610, SEQ ID NO: 611, SEQ ID NO: 612, SEQ ID NO: 613, SEQ ID NO: 614, SEQ ID NO: 615, SEQ ID NO: 616, SEQ ID NO: 617, SEQ ID NO: 618, SEQ ID NO: 619, SEQ ID NO: 620, SEQ ID NO: 621, SEQ ID NO: 622, SEQ ID NO: 623, SEQ ID NO: 624, SEQ ID NO: 625, SEQ ID NO: 626, SEQ ID NO: 627, SEQ ID NO: 628, SEQ ID NO: 629, SEQ ID NO: 630, SEQ ID NO: 631, SEQ ID NO: 632, SEQ ID NO: 633, SEQ ID NO: 634, SEQ ID NO: 635, SEQ ID NO: 636, SEQ ID NO: 637, SEQ ID NO: 638, SEQ ID NO: 639, SEQ ID NO: 640, SEQ ID NO: 641, SEQ ID NO: 642, SEQ ID NO: 643, SEQ ID NO: 644, SEQ ID NO: 645, SEQ ID NO: 646, SEQ ID NO: 647, SEQ ID NO: 648, SEQ ID NO: 649, SEQ ID NO: 650, SEQ ID NO: 651, SEQ ID NO: 652, SEQ ID NO: 653, SEQ ID NO: 654, SEQ ID NO: 655, SEQ ID NO: 656, SEQ ID NO: 657, SEQ ID NO: 658, SEQ ID NO: 659, SEQ ID NO: 660, SEQ ID NO: 661, SEQ ID NO: 662, SEQ ID NO: 663, SEQ ID NO: 664, SEQ ID NO: 665, SEQ ID NO: 666, SEQ ID NO: 667, SEQ ID NO: 668, SEQ ID NO: 669, SEQ ID NO: 670, SEQ ID NO: 671, SEQ ID NO: 672, SEQ ID NO: 673, SEQ ID NO: 674, SEQ ID NO: 675, SEQ ID NO: 676, SEQ ID NO: 677, SEQ ID NO: 678, SEQ ID NO: 679, SEQ ID NO: 680, SEQ ID NO: 681, SEQ ID NO: 682, SEQ ID NO: 683, SEQ ID NO: 684, SEQ ID NO: 685, SEQ ID NO: 686, SEQ ID NO: 687, SEQ ID NO: 688, SEQ ID NO: 689, SEQ ID NO: 690, SEQ ID NO: 691, SEQ ID NO: 692, SEQ ID NO: 693, SEQ ID NO: 694, SEQ ID NO: 695, or SEQ ID NO: 696.

[0751] In some examples of any of the ABPCs described herein, the first antigen-binding domain includes a light chain variable domain comprising SEQ ID NO: 790, and a heavy chain variable domain comprising: SEQ ID NO: 502, SEQ ID NO: 510, SEQ ID NO: 511, SEQ ID NO: 512, SEQ ID NO: 513, SEQ ID NO: 514, SEQ ID NO: 515, SEQ ID NO: 516, SEQ ID NO: 517, SEQ ID NO: 518, SEQ ID NO: 519, SEQ ID NO: 520, SEQ ID NO: 521, SEQ ID NO: 522, SEQ ID NO: 523, SEQ ID NO: 524, SEQ ID NO: 525, SEQ ID NO: 526, SEQ ID NO: 527, SEQ ID NO: 528, SEQ ID NO: 529, SEQ ID NO: 530, SEQ ID NO: 531, SEQ ID NO: 532, SEQ ID NO: 533, SEQ ID NO: 534, SEQ ID NO: 535, SEQ ID NO: 536, SEQ ID NO: 537, SEQ ID NO: 538, SEQ ID NO: 539, SEQ ID NO: 540, SEQ ID NO: 541, SEQ ID NO: 542, SEQ ID NO: 543, SEQ ID NO: 544, SEQ ID NO: 545, SEQ ID NO: 546, SEQ ID NO: 547, SEQ ID NO: 548, SEQ ID NO: 577, SEQ ID NO: 578, SEQ ID NO: 579, SEQ ID NO: 580, SEQ ID NO: 581, SEQ ID NO: 582, SEQ ID NO: 583, SEQ ID NO: 584, SEQ ID NO: 585, SEQ ID NO: 586, SEQ ID NO: 587, SEQ ID NO: 588, SEQ ID NO: 589, SEQ ID NO: 590, SEQ ID NO: 591, SEQ ID NO: 592, SEQ ID NO: 593, SEQ ID NO: 594, SEQ ID NO: 595, SEQ ID NO: 596, SEQ ID NO: 597, SEQ ID NO: 598, SEQ ID NO: 599, SEQ ID NO: 600, SEQ ID NO: 601, SEQ ID NO: 602, SEQ ID NO: 603, SEQ ID NO: 604, SEQ ID NO: 605, SEQ ID NO: 606, SEQ ID NO: 607, SEQ ID NO: 608, SEQ ID NO: 609, SEQ ID NO: 610, SEQ ID NO: 611, SEQ ID NO: 612, SEQ ID NO: 613, SEQ ID NO: 614, SEQ ID NO: 615, SEQ ID NO: 616, SEQ ID NO: 617, SEQ ID NO: 618, SEQ ID NO: 619, SEQ ID NO: 620, SEQ ID NO: 621, SEQ ID NO: 622, SEQ ID NO: 623, SEQ ID NO: 624, SEQ ID NO: 625, SEQ ID NO: 626, SEQ ID NO: 627, SEQ ID NO: 628, SEQ ID NO: 629, SEQ ID NO: 630, SEQ ID NO: 631, SEQ ID NO: 632, SEQ ID NO: 633, SEQ ID NO: 634, SEQ ID NO: 635, SEQ ID NO: 636, SEQ ID NO: 637, SEQ ID NO: 638, SEQ ID NO: 639, SEQ ID NO: 640, SEQ ID NO: 641, SEQ ID NO: 642, SEQ ID NO: 643, SEQ ID NO: 644, SEQ ID NO: 645, SEQ ID NO: 646, SEQ ID NO: 647, SEQ ID NO: 648, SEQ ID NO: 649, SEQ ID NO: 650, SEQ ID NO: 651, SEQ ID NO: 652, SEQ ID NO: 653, SEQ ID NO: 654, SEQ ID NO: 655, SEQ ID NO: 656, SEQ ID NO: 657, SEQ ID NO: 658, SEQ ID NO: 659, SEQ ID NO: 660, SEQ ID NO: 661, SEQ ID NO: 662, SEQ ID NO: 663, SEQ ID NO: 664, SEQ ID NO: 665, SEQ ID NO: 666, SEQ ID NO: 667, SEQ ID NO: 668, SEQ ID NO: 669, SEQ ID NO: 670, SEQ ID NO: 671, SEQ ID NO: 672, SEQ ID NO: 673, SEQ ID NO: 674, SEQ ID NO: 675, SEQ ID NO: 676, SEQ ID NO: 677, SEQ ID NO: 678, SEQ ID NO: 679, SEQ ID NO: 680, SEQ ID NO: 681, SEQ ID NO: 682, SEQ ID NO: 683, SEQ ID NO: 684, SEQ ID NO: 685, SEQ ID NO: 686, SEQ ID NO: 687, SEQ ID NO: 688, SEQ ID NO: 689, SEQ ID NO: 690, SEQ ID NO: 691, SEQ ID NO: 692, SEQ ID NO: 693, SEQ ID NO: 694, SEQ ID NO: 695, or SEQ ID NO: 696.

[0752] Also provided herein are pharmaceutical compositions including any of the ABPCs described herein. Also provided herein are methods of treating a subject in need thereof that include administering a therapeutically effective amount of any of the ABPCs described herein to the subject.

[0753] In some examples of any of the ABPCs described herein, a composition including the ABPC (e.g., any of the ABPCs described herein) can provide for an increase (e.g., a detectable increase) (e.g., at least a 1% increase, at least a 2% increase, at least a 5% increase, at least a 10% increase, at least a 15% increase, at least a 20% increase, at least a 25% increase, at least a 30% increase, at least a 35% increase, at least a 40% increase, at least a 45% increase, at least a 50% increase, at least a 55% increase, at least a 60% increase, at least a 65% increase, at least a 70% increase, at least a 75% increase, at least a 80% increase, at least a 85% increase, at least a 90% increase, at least a 95% increase, at least a 100% increase, at least a 120% increase, at least a 140% increase, at least a 160% increase, at least a 180% increase, at least a 200% increase, at least a 250% increase, at least a 300% increase, at least a 350% increase, at least a 400% increase, at least a 450% increase, at least a 500% increase, at least a 1,000% increase, at least a 2,000% increase, at least a 3,000% increase, at least a 4,000% increase, at least a 5,000% increase, at least a 6,000% increase, at least a 7,000% increase, at least a 8,000% increase, at a least a 9,000% increase, or at least a 10,000% increase, or about a 1% increase to about 10,000% increase, about a 1% increase to about a 9,000% increase, about a 1% increase to about a 8,000% increase, about a 1% increase to about a 7,000% increase, about a 1% increase to about a 6,000% increase, about a 1% increase to about a 5,000% increase, about a 1% increase to about a 4,000% increase, about a 1% increase to about a 3,000% increase, about a 1% increase to about a 2,000% increase, about a 1% increase to about a 1,000% increase, about a 1% increase to about a 500% increase, about a 1% increase to about a 450% increase, about a 1% increase to about a 400% increase, about a 1% increase to about a 350% increase, about a 1% increase to about a 300% increase, about a 1% increase to about a 250% increase, about a 1% increase to about a 200% increase, about a 1% increase to about a 180% increase, about a 1% increase to about a 160% increase, about a 1% increase to about a 140% increase, about a 1% increase to about a 120% increase, about a 1% increase to about a 100% increase, about a 1% increase to about a 95% increase, about a 1% increase to about a 90% increase, about a 1% increase to about a 85% increase, about a 1% increase to about a 80% increase, about a 1% increase to about a 75% increase, about a 1% increase to about a 70% increase, about a 1% increase to about a 65% increase, about a 1% increase to about a 60% increase, about a 1% increase to about a 55% increase, about a 1% increase to about a 50% increase, about a 1% increase to about a 45% increase, about a 1% increase to about a 40% increase, about a 1% increase to about a 35% increase, about a 1% increase to about a 25% increase, about a 1% increase to about a 20% increase, about a 1% increase to about a 15% increase, about a 1% increase to about a 10% increase, about a 1% increase to about a 5% increase, about a 2% increase to about 10,000% increase, about a 2% increase to about a 9,000% increase, about a 2% increase to about a 8,000% increase, about a 2% increase to about a 7,000% increase, about a 2% increase to about a 6,000% increase, about a 2% increase to about a 5,000% increase, about a 2% increase to about a 4,000% increase, about a 2% increase to about a 3,000% increase, about a 2% increase to about a 2,000% increase, about a 2% increase to about a 1,000% increase, about a 2% increase to about a 500% increase, about a 2% increase to about a 450% increase, about a 2% increase to about a 400% increase, about a 2% increase to about a 350% increase, about a 2% increase to about a 300% increase, about a 2% increase to about a 250% increase, about a 2% increase to about a 200% increase, about a 2% increase to about a 180% increase, about a 2% increase to about a 160% increase, about a 2% increase to about a 140% increase, about a 2% increase to about a 120% increase, about a 2% increase to about a 100% increase, about a 2% increase to about a 95% increase, about a 2% increase to about a 90% increase, about a 2% increase to about a 85% increase, about a 2% increase to about a 80% increase, about a 2% increase to about a 75% increase, about a 2% increase to about a 70% increase, about a 2% increase to about a 65% increase, about a 2% increase to about a 60% increase, about a 2% increase to about a 55% increase, about a 2% increase to about a 50% increase, about a 2% increase to about a 45% increase, about a 2% increase to about a 40% increase, about a 2% increase to about a 35% increase, about a 2% increase to about a 25% increase, about a 2% increase to about a 20% increase, about a 2% increase to about a 15% increase, about a 2% increase to about a 10% increase, about a 2% increase to about a 5% increase, about a 5% increase to about 10,000% increase, about a 5% increase to about a 9,000% increase, about a 5% increase to about a 8,000% increase, about a 5% increase to about a 7,000% increase, about a 5% increase to about a 6,000% increase, about a 5% increase to about a 5,000% increase, about a 5% increase to about a 4,000% increase, about a 5% increase to about a 3,000% increase, about a 5% increase to about a 2,000% increase, about a 5% increase to about a 1,000% increase, about a 5% increase to about a 500% increase, about a 5% increase to about a 450% increase, about a 5% increase to about a 400% increase, about a 5% increase to about a 350% increase, about a 5% increase to about a 300% increase, about a 5% increase to about a 250% increase, about a 5% increase to about a 200% increase, about a 5% increase to about a 180% increase, about a 5% increase to about a 160% increase, about a 5% increase to about a 140% increase, about a 5% increase to about a 120% increase, about a 5% increase to about a 100% increase, about a 5% increase to about a 95% increase, about a 5% increase to about a 90% increase, about a 5% increase to about a 85% increase, about a 5% increase to about a 80% increase, about a 5% increase to about a 75% increase, about a 5% increase to about a 70% increase, about a 5% increase to about a 65% increase, about a 5% increase to about a 60% increase, about a 5% increase to about a 55% increase, about a 5% increase to about a 50% increase, about a 5% increase to about a 45% increase, about a 5% increase to about a 40% increase, about a 5% increase to about a 35% increase, about a 5% increase to about a 25% increase, about a 5% increase to about a 20% increase, about a 5% increase to about a 15% increase, about a 5% increase to about a 10% increase, about a 10% increase to about 10,000% increase, about a 10% increase to about a 9,000% increase, about a 10% increase to about a 8,000% increase, about a 10% increase to about a 7,000% increase, about a 10% increase to about a 6,000% increase, about a 10% increase to about a 5,000% increase, about a 10% increase to about a 4,000% increase, about a 10% increase to about a 3,000% increase, about a 10% increase to about a 2,000% increase, about a 10% increase to about a 1,000% increase, about a 10% increase to about a 500% increase, about a 10% increase to about a 450% increase, about a 10% increase to about a 400% increase, about a 10% increase to about a 350% increase, about a 10% increase to about a 300% increase, about a 10% increase to about a 250% increase, about a 10% increase to about a 200% increase, about a 10% increase to about a 180% increase, about a 10% increase to about a 160% increase, about a 10% increase to about a 140% increase, about a 10% increase to about a 120% increase, about a 10% increase to about a 100% increase, about a 10% increase to about a 95% increase, about a 10% increase to about a 90% increase, about a 10% increase to about a 85% increase, about a 10% increase to about a 80% increase, about a 10% increase to about a 75% increase, about a 10% increase to about a 70% increase, about a 10% increase to about a 65% increase, about a 10% increase to about a 60% increase, about a 10% increase to about a 55% increase, about a 10% increase to about a 50% increase, about a 10% increase to about a 45% increase, about a 10% increase to about a 40% increase, about a 10% increase to about a 35% increase, about a 10% increase to about a 30% increase, about a 10% increase to about a 25% increase, about a 10% increase to about a 20% increase, about a 10% increase to about a 15% increase, about a 15% increase to about 10,000% increase, about a 15% increase to about a 9,000% increase, about a 15% increase to about a 8,000% increase, about a 15% increase to about a 7,000% increase, about a 15% increase to about a 6,000% increase, about a 15% increase to about a 5,000% increase, about a 15% increase to about a 4,000% increase, about a 15% increase to about a 3,000% increase, about a 15% increase to about a 2,000% increase, about a 15% increase to about a 1,000% increase, about a 15% increase to about a 500% increase, about a 15% increase to about a 450% increase, about a 15% increase to about a 400% increase, about a 15% increase to about a 350% increase, about a 15% increase to about a 300% increase, about a 15% increase to about a 250% increase, about a 15% increase to about a 200% increase, about a 15% increase to about a 180% increase, about a 15% increase to about a 160% increase, about a 15% increase to about a 140% increase, about a 15% increase to about a 120% increase, about a 15% increase to about a 100% increase, about a 15% increase to about a 95% increase, about a 15% increase to about a 90% increase, about a 15% increase to about a 85% increase, about a 15% increase to about a 80% increase, about a 15% increase to about a 75% increase, about a 15% increase to about a 70% increase, about a 15% increase to about a 65% increase, about a 15% increase to about a 60% increase, about a 15% increase to about a 55% increase, about a 15% increase to about a 50% increase, about a 15% increase to about a 45% increase, about a 15% increase to about a 40% increase, about a 15% increase to about a 35% increase, about a 15% increase to about a 30% increase, about a 15% increase to about a 25% increase, about a 15% increase to about a 20% increase, about a 20% increase to about 10,000% increase, about a 20% increase to about a 9,000% increase, about a 20% increase to about a 8,000% increase, about a 20% increase to about a 7,000% increase, about a 20% increase to about a 6,000% increase, about a 20% increase to about a 5,000% increase, about a 20% increase to about a 4,000% increase, about a 20% increase to about a 3,000% increase, about a 20% increase to about a 2,000% increase, about a 20% increase to about a 1,000% increase, about a 20% increase to about a 500% increase, about a 20% increase to about a 450% increase, about a 20% increase to about a 400% increase, about a 20% increase to about a 350% increase, about a 20% increase to about a 300% increase, about a 20% increase to about a 250% increase, about a 20% increase to about a 200% increase, about a 20% increase to about a 180% increase, about a 20% increase to about a 160% increase, about a 20% increase to about a 140% increase, about a 20% increase to about a 120% increase, about a 20% increase to about a 100% increase, about a 20% increase to about a 95% increase, about a 20% increase to about a 90% increase, about a 20% increase to about a 85% increase, about a 20% increase to about a 80% increase, about a 20% increase to about a 75% increase, about a 20% increase to about a 70% increase, about a 20% increase to about a 65% increase, about a 20% increase to about a 60% increase, about a 20% increase to about a 55% increase, about a 20% increase to about a 50% increase, about a 20% increase to about a 45% increase, about a 20% increase to about a 40% increase, about a 20% increase to about a 35% increase, about a 20% increase to about a 30% increase, about a 20% increase to about a 25% increase, about a 25% increase to about 10,000% increase, about a 25% increase to about a 9,000% increase, about a 25% increase to about a 8,000% increase, about a 25% increase to about a 7,000% increase, about a 25% increase to about a 6,000% increase, about a 25% increase to about a 5,000% increase, about a 25% increase to about a 4,000% increase, about a 25% increase to about a 3,000% increase, about a 25% increase to about a 2,000% increase, about a 25% increase to about a 1,000% increase, about a 25% increase to about a 500% increase, about a 25% increase to about a 450% increase, about a 25% increase to about a 400% increase, about a 25% increase to about a 350% increase, about a 25% increase to about a 300% increase, about a 25% increase to about a 250% increase, about a 25% increase to about a 200% increase, about a 25% increase to about a 180% increase, about a 25% increase to about a 160% increase, about a 25% increase to about a 140% increase, about a 25% increase to about a 120% increase, about a 25% increase to about a 100% increase, about a 25% increase to about a 95% increase, about a 25% increase to about a 90% increase, about a 25% increase to about a 85% increase, about a 25% increase to about a 80% increase, about a 25% increase to about a 75% increase, about a 25% increase to about a 70% increase, about a 25% increase to about a 65% increase, about a 25% increase to about a 60% increase, about a 25% increase to about a 55% increase, about a 25% increase to about a 50% increase, about a 25% increase to about a 45% increase, about a 25% increase to about a 40% increase, about a 25% increase to about a 35% increase, about a 25% increase to about a 30% increase, about a 30% increase to about 10,000% increase, about a 30% increase to about a 9,000% increase, about a 30% increase to about a 8,000% increase, about a 30% increase to about a 7,000% increase, about a 30% increase to about a 6,000% increase, about a 30% increase to about a 5,000% increase, about a 30% increase to about a 4,000% increase, about a 30% increase to about a 3,000% increase, about a 30% increase to about a 2,000% increase, about a 30% increase to about a 1,000% increase, about a 30% increase to about a 500% increase, about a 30% increase to about a 450% increase, about a 30% increase to about a 400% increase, about a 30% increase to about a 350% increase, about a 30% increase to about a 300% increase, about a 30% increase to about a 250% increase, about a 30% increase to about a 200% increase, about a 30% increase to about a 180% increase, about a 30% increase to about a 160% increase, about a 30% increase to about a 140% increase, about a 30% increase to about a 120% increase, about a 30% increase to about a 100% increase, about a 30% increase to about a 95% increase, about a 30% increase to about a 90% increase, about a 30% increase to about a 85% increase, about a 30% increase to about a 80% increase, about a 30% increase to about a 75% increase, about a 30% increase to about a 70% increase, about a 30% increase to about a 65% increase, about a 30% increase to about a 60% increase, about a 30% increase to about a 55% increase, about a 30% increase to about a 50% increase, about a 30% increase to about a 45% increase, about a 30% increase to about a 40% increase, about a 30% increase to about a 35% increase, about a 35% increase to about 10,000% increase, about a 35% increase to about a 9,000% increase, about a 35% increase to about a 8,000% increase, about a 35% increase to about a 7,000% increase, about a 35% increase to about a 6,000% increase, about a 35% increase to about a 5,000% increase, about a 35% increase to about a 4,000% increase, about a 35% increase to about a 3,000% increase, about a 35% increase to about a 2,000% increase, about a 35% increase to about a 1,000% increase, about a 35% increase to about a 500% increase, about a 35% increase to about a 450% increase, about a 35% increase to about a 400% increase, about a 35% increase to about a 350% increase, about a 35% increase to about a 300% increase, about a 35% increase to about a 250% increase, about a 35% increase to about a 200% increase, about a 35% increase to about a 180% increase, about a 35% increase to about a 160% increase, about a 35% increase to about a 140% increase, about a 35% increase to about a 120% increase, about a 35% increase to about a 100% increase, about a 35% increase to about a 95% increase, about a 35% increase to about a 90% increase, about a 35% increase to about a 85% increase, about a 35% increase to about a 80% increase, about a 35% increase to about a 75% increase, about a 35% increase to about a 70% increase, about a 35% increase to about a 65% increase, about a 35% increase to about a 60% increase, about a 35% increase to about a 55% increase, about a 35% increase to about a 50% increase, about a 35% increase to about a 45% increase, about a 35% increase to about a 40% increase, about a 40% increase to about 10,000% increase, about a 40% increase to about a 9,000% increase, about a 40% increase to about a 8,000% increase, about a 40% increase to about a 7,000% increase, about a 40% increase to about a 6,000% increase, about a 40% increase to about a 5,000% increase, about a 40% increase to about a 4,000% increase, about a 40% increase to about a 3,000% increase, about a 40% increase to about a 2,000% increase, about a 40% increase to about a 1,000% increase, about a 40% increase to about a 500% increase, about a 40% increase to about a 450% increase, about a 40% increase to about a 400% increase, about a 40% increase to about a 350% increase, about a 40% increase to about a 300% increase, about a 40% increase to about a 250% increase, about a 40% increase to about a 200% increase, about a 40% increase to about a 180% increase, about a 40% increase to about a 160% increase, about a 40% increase to about a 140% increase, about a 40% increase to about a 120% increase, about a 40% increase to about a 100% increase, about a 40% increase to about a 95% increase, about a 40% increase to about a 90% increase, about a 40% increase to about a 85% increase, about a 40% increase to about a 80% increase, about a 40% increase to about a 75% increase, about a 40% increase to about a 70% increase, about a 40% increase to about a 65% increase, about a 40% increase to about a 60% increase, about a 40% increase to about a 55% increase, about a 40% increase to about a 50% increase, about a 40% increase to about a 45% increase, about a 45% increase to about 10,000% increase, about a 45% increase to about a 9,000% increase, about a 45% increase to about a 8,000% increase, about a 45% increase to about a 7,000% increase, about a 45% increase to about a 6,000% increase, about a 45% increase to about a 5,000% increase, about a 45% increase to about a 4,000% increase, about a 45% increase to about a 3,000% increase, about a 45% increase to about a 2,000% increase, about a 45% increase to about a 1,000% increase, about a 45% increase to about a 500% increase, about a 45% increase to about a 450% increase, about a 45% increase to about a 400% increase, about a 45% increase to about a 350% increase, about a 45% increase to about a 300% increase, about a 45% increase to about a 250% increase, about a 45% increase to about a 200% increase, about a 45% increase to about a 180% increase, about a 45% increase to about a 160% increase, about a 45% increase to about a 140% increase, about a 45% increase to about a 120% increase, about a 45% increase to about a 100% increase, about a 45% increase to about a 95% increase, about a 45% increase to about a 90% increase, about a 45% increase to about a 85% increase, about a 45% increase to about a 80% increase, about a 45% increase to about a 75% increase, about a 45% increase to about a 70% increase, about a 45% increase to about a 65% increase, about a 45% increase to about a 60% increase, about a 45% increase to about a 55% increase, about a 45% increase to about a 50% increase, about a 50% increase to about 10,000% increase, about a 50% increase to about a 9,000% increase, about a 50% increase to about a 8,000% increase, about a 50% increase to about a 7,000% increase, about a 50% increase to about a 6,000% increase, about a 50% increase to about a 5,000% increase, about a 50% increase to about a 4,000% increase, about a 50% increase to about a 3,000% increase, about a 50% increase to about a 2,000% increase, about a 50% increase to about a 1,000% increase, about a 50% increase to about a 500% increase, about a 50% increase to about a 450% increase, about a 50% increase to about a 400% increase, about a 50% increase to about a 350% increase, about a 50% increase to about a 300% increase, about a 50% increase to about a 250% increase, about a 50% increase to about a 200% increase, about a 50% increase to about a 180% increase, about a 50% increase to about a 160% increase, about a 50% increase to about a 140% increase, about a 50% increase to about a 120% increase, about a 50% increase to about a 100% increase, about a 50% increase to about a 95% increase, about a 50% increase to about a 90% increase, about a 50% increase to about a 85% increase, about a 50% increase to about a 80% increase, about a 50% increase to about a 75% increase, about a 50% increase to about a 70% increase, about a 50% increase to about a 65% increase, about a 50% increase to about a 60% increase, about a 50% increase to about a 55% increase, about a 55% increase to about 10,000% increase, about a 55% increase to about a 9,000% increase, about a 55% increase to about a 8,000% increase, about a 55% increase to about a 7,000% increase, about a 55% increase to about a 6,000% increase, about a 55% increase to about a 5,000% increase, about a 55% increase to about a 4,000% increase, about a 55% increase to about a 3,000% increase, about a 55% increase to about a 2,000% increase, about a 55% increase to about a 1,000% increase, about a 55% increase to about a 500% increase, about a 55% increase to about a 450% increase, about a 55% increase to about a 400% increase, about a 55% increase to about a 350% increase, about a 55% increase to about a 300% increase, about a 55% increase to about a 250% increase, about a 55% increase to about a 200% increase, about a 55% increase to about a 180% increase, about a 55% increase to about a 160% increase, about a 55% increase to about a 140% increase, about a 55% increase to about a 120% increase, about a 55% increase to about a 100% increase, about a 55% increase to about a 95% increase, about a 55% increase to about a 90% increase, about a 55% increase to about a 85% increase, about a 55% increase to about a 80% increase, about a 55% increase to about a 75% increase, about a 55% increase to about a 70% increase, about a 55% increase to about a 65% increase, about a 55% increase to about a 60% increase, about a 60% increase to about 10,000% increase, about a 60% increase to about a 9,000% increase, about a 60% increase to about a 8,000% increase, about a 60% increase to about a 7,000% increase, about a 60% increase to about a 6,000% increase, about a 60% increase to about a 5,000% increase, about a 60% increase to about a 4,000% increase, about a 60% increase to about a 3,000% increase, about a 60% increase to about a 2,000% increase, about a 60% increase to about a 1,000% increase, about a 60% increase to about a 500% increase, about a 60% increase to about a 450% increase, about a 60% increase to about a 400% increase, about a 60% increase to about a 350% increase, about a 60% increase to about a 300% increase, about a 60% increase to about a 250% increase, about a 60% increase to about a 200% increase, about a 60% increase to about a 180% increase, about a 60% increase to about a 160% increase, about a 60% increase to about a 140% increase, about a 60% increase to about a 120% increase, about a 60% increase to about a 100% increase, about a 60% increase to about a 95% increase, about a 60% increase to about a 90% increase, about a 60% increase to about a 85% increase, about a 60% increase to about a 80% increase, about a 60% increase to about a 75% increase, about a 60% increase to about a 70% increase, about a 60% increase to about a 65% increase, about a 65% increase to about 10,000% increase, about a 65% increase to about a 9,000% increase, about a 65% increase to about a 8,000% increase, about a 65% increase to about a 7,000% increase, about a 65% increase to about a 6,000% increase, about a 65% increase to about a 5,000% increase, about a 65% increase to about a 4,000% increase, about a 65% increase to about a 3,000% increase, about a 65% increase to about a 2,000% increase, about a 65% increase to about a 1,000% increase, about a 65% increase to about a 500% increase, about a 65% increase to about a 450% increase, about a 65% increase to about a 400% increase, about a 65% increase to about a 350% increase, about a 65% increase to about a 300% increase, about a 65% increase to about a 250% increase, about a 65% increase to about a 200% increase, about a 65% increase to about a 180% increase, about a 65% increase to about a 160% increase, about a 65% increase to about a 140% increase, about a 65% increase to about a 120% increase, about a 65% increase to about a 100% increase, about a 65% increase to about a 95% increase, about a 65% increase to about a 90% increase, about a 65% increase to about a 85% increase, about a 65% increase to about a 80% increase, about a 65% increase to about a 75% increase, about a 65% increase to about a 70% increase, about a 70% increase to about 10,000% increase, about a 70% increase to about a 9,000% increase, about a 70% increase to about a 8,000% increase, about a 70% increase to about a 7,000% increase, about a 70% increase to about a 6,000% increase, about a 70% increase to about a 5,000% increase, about a 70% increase to about a 4,000% increase, about a 70% increase to about a 3,000% increase, about a 70% increase to about a 2,000% increase, about a 70% increase to about a 1,000% increase, about a 70% increase to about a 500% increase, about a 70% increase to about a 450% increase, about a 70% increase to about a 400% increase, about a 70% increase to about a 350% increase, about a 70% increase to about a 300% increase, about a 70% increase to about a 250% increase, about a 70% increase to about a 200% increase, about a 70% increase to about a 180% increase, about a 70% increase to about a 160% increase, about a 70% increase to about a 140% increase, about a 70% increase to about a 120% increase, about a 70% increase to about a 100% increase, about a 70% increase to about a 95% increase, about a 70% increase to about a 90% increase, about a 70% increase to about a 85% increase, about a 70% increase to about a 80% increase, about a 70% increase to about a 75% increase, about a 75% increase to about 10,000% increase, about a 75% increase to about a 9,000% increase, about a 75% increase to about a 8,000% increase, about a 75% increase to about a 7,000% increase, about a 75% increase to about a 6,000% increase, about a 75% increase to about a 5,000% increase, about a 75% increase to about a 4,000% increase, about a 75% increase to about a 3,000% increase, about a 75% increase to about a 2,000% increase, about a 75% increase to about a 1,000% increase, about a 75% increase to about a 500% increase, about a 75% increase to about a 450% increase, about a 75% increase to about a 400% increase, about a 75% increase to about a 350% increase, about a 75% increase to about a 300% increase, about a 75% increase to about a 250% increase, about a 75% increase to about a 200% increase, about a 75% increase to about a 180% increase, about a 75% increase to about a 160% increase, about a 75% increase to about a 140% increase, about a 75% increase to about a 120% increase, about a 75% increase to about a 100% increase, about a 75% increase to about a 95% increase, about a 75% increase to about a 90% increase, about a 75% increase to about a 85% increase, about a 75% increase to about a 80%, about a 80% increase to about 10,000% increase, about a 80% increase to about a 9,000% increase, about a 80% increase to about a 8,000% increase, about a 80% increase to about a 7,000% increase, about a 80% increase to about a 6,000% increase, about a 80% increase to about a 5,000% increase, about a 80% increase to about a 4,000% increase, about a 80% increase to about a 3,000% increase, about a 80% increase to about a 2,000% increase, about a 80% increase to about a 1,000% increase, increase, about a 80% increase to about a 500% increase, about a 80% increase to about a 450% increase, about a 80% increase to about a 400% increase, about a 80% increase to about a 350% increase, about a 80% increase to about a 300% increase, about a 80% increase to about a 250% increase, about a 80% increase to about a 200% increase, about a 80% increase to about a 180% increase, about a 80% increase to about a 160% increase, about a 80% increase to about a 140% increase, about a 80% increase to about a 120% increase, about a 80% increase to about a 100% increase, about a 80% increase to about a 95% increase, about a 80% increase to about a 90% increase, about a 80% increase to about a 85% increase, about a 85% increase to about 10,000% increase, about a 85% increase to about a 9,000% increase, about a 85% increase to about a 8,000% increase, about a 85% increase to about a 7,000% increase, about a 85% increase to about a 6,000% increase, about a 85% increase to about a 5,000% increase, about a 85% increase to about a 4,000% increase, about a 85% increase to about a 3,000% increase, about a 85% increase to about a 2,000% increase, about a 85% increase to about a 1,000% increase, about a 85% increase to about a 500% increase, about a 85% increase to about a 450% increase, about a 85% increase to about a 400% increase, about a 85% increase to about a 350% increase, about a 85% increase to about a 300% increase, about a 85% increase to about a 250% increase, about a 85% increase to about a 200% increase, about a 85% increase to about a 180% increase, about a 85% increase to about a 160% increase, about a 85% increase to about a 140% increase, about a 85% increase to about a 120% increase, about a 85% increase to about a 100% increase, about a 85% increase to about a 95% increase, about a 85% increase to about a 90% increase, about a 90% increase to about 10,000% increase, about a 90% increase to about a 9,000% increase, about a 90% increase to about a 8,000% increase, about a 90% increase to about a 7,000% increase, about a 90% increase to about a 6,000% increase, about a 90% increase to about a 5,000% increase, about a 90% increase to about a 4,000% increase, about a 90% increase to about a 3,000% increase, about a 90% increase to about a 2,000% increase, about a 90% increase to about a 1,000% increase, about a 90% increase to about a 500% increase, about a 90% increase to about a 450% increase, about a 90% increase to about a 400% increase, about a 90% increase to about a 350% increase, about a 90% increase to about a 300% increase, about a 90% increase to about a 250% increase, about a 90% increase to about a 200% increase, about a 90% increase to about a 180% increase, about a 90% increase to about a 160% increase, about a 90% increase to about a 140% increase, about a 90% increase to about a 120% increase, about a 90% increase to about a 100% increase, about a 90% increase to about a 95% increase, about a 95% increase to about 10,000% increase, about a 95% increase to about a 9,000% increase, about a 95% increase to about a 8,000% increase, about a 95% increase to about a 7,000% increase, about a 95% increase to about a 6,000% increase, about a 95% increase to about a 5,000% increase, about a 95% increase to about a 4,000% increase, about a 95% increase to about a 3,000% increase, about a 95% increase to about a 2,000% increase, about a 95% increase to about a 1,000% increase, about a 95% increase to about a 500% increase, about a 95% increase to about a 450% increase, about a 95% increase to about a 400% increase, about a 95% increase to about a 350% increase, about a 95% increase to about a 300% increase, about a 95% increase to about a 250% increase, about a 95% increase to about a 200% increase, about a 95% increase to about a 180% increase, about a 95% increase to about a 160% increase, about a 95% increase to about a 140% increase, about a 95% increase to about a 120% increase, about a 95% increase to about a 100% increase, about a 100% increase to about 10,000% increase, about a 100% increase to about a 9,000% increase, about a 100% increase to about a 8,000% increase, about a 100% increase to about a 7,000% increase, about a 100% increase to about a 6,000% increase, about a 100% increase to about a 5,000% increase, about a 100% increase to about a 4,000% increase, about a 100% increase to about a 3,000% increase, about a 100% increase to about a 2,000% increase, about a 100% increase to about a 1,000% increase, about a 100% increase to about a 500% increase, about a 100% increase to about a 450% increase, about a 100% increase to about a 400% increase, about a 100% increase to about a 350% increase, about a 100% increase to about a 300% increase, about a 100% increase to about a 250% increase, about a 100% increase to about a 200% increase, about a 100% increase to about a 180% increase, about a 100% increase to about a 160% increase, about a 100% increase to about a 140% increase, about a 100% increase to about a 120% increase, about a 120% increase to about 10,000% increase, about a 120% increase to about a 9,000% increase, about a 120% increase to about a 8,000% increase, about a 120% increase to about a 7,000% increase, about a 120% increase to about a 6,000% increase, about a 120% increase to about a 5,000% increase, about a 120% increase to about a 4,000% increase, about a 120% increase to about a 3,000% increase, about a 120% increase to about a 2,000% increase, about a 120% increase to about a 1,000% increase, about a 120% increase to about a 500% increase, about a 120% increase to about a 450% increase, about a 120% increase to about a 400% increase, about a 120% increase to about a 350% increase, about a 120% increase to about a 300% increase, about a 120% increase to about a 250% increase, about a 120% increase to about a 200% increase, about a 120% increase to about a 180% increase, about a 120% increase to about a 160% increase, about a 120% increase to about a 140% increase, about a 140% increase to about 10,000% increase, about a 140% increase to about a 9,000% increase, about a 140% increase to about a 8,000% increase, about a 140% increase to about a 7,000% increase, about a 140% increase to about a 6,000% increase, about a 140% increase to about a 5,000% increase, about a 140% increase to about a 4,000% increase, about a 140% increase to about a 3,000% increase, about a 140% increase to about a 2,000% increase, about a 140% increase to about a 1,000% increase, about a 140% increase to about a 500% increase, about a 140% increase to about a 450% increase, about a 140% increase to about a 400% increase, about a 140% increase to about a 350% increase, about a 140% increase to about a 300% increase, about a 140% increase to about a 250% increase, about a 140% increase to about a 200% increase, about a 140% increase to about a 180% increase, about a 140% increase to about a 160% increase, about a 160% increase to about 10,000% increase, about a 160% increase to about a 9,000% increase, about a 160% increase to about a 8,000% increase, about a 160% increase to about a 7,000% increase, about a 160% increase to about a 6,000% increase, about a 160% increase to about a 5,000% increase, about a 160% increase to about a 4,000% increase, about a 160% increase to about a 3,000% increase, about a 160% increase to about a 2,000% increase, about a 160% increase to about a 1,000% increase, about a 160% increase to about a 500% increase, about a 160% increase to about a 450% increase, about a 160% increase to about a 400% increase, about a 160% increase to about a 350% increase, about a 160% increase to about a 300% increase, about a 160% increase to about a 250% increase, about a 160% increase to about a 200% increase, about a 160% increase to about a 180% increase, about a 180% increase to about 10,000% increase, about a 180% increase to about a 9,000% increase, about a 180% increase to about a 8,000% increase, about a 180% increase to about a 7,000% increase, about a 180% increase to about a 6,000% increase, about a 180% increase to about a 5,000% increase, about a 180% increase to about a 4,000% increase, about a 180% increase to about a 3,000% increase, about a 180% increase to about a 2,000% increase, about a 180% increase to about a 1,000% increase, about a 180% increase to about a 500% increase, about a 180% increase to about a 450% increase, about a 180% increase to about a 400% increase, about a 180% increase to about a 350% increase, about a 180% increase to about a 300% increase, about a 180% increase to about a 250% increase, about a 180% increase to about a 200% increase, about a 200% increase to about 10,000% increase, about a 200% increase to about a 9,000% increase, about a 200% increase to about a 8,000% increase, about a 200% increase to about a 7,000% increase, about a 200% increase to about a 6,000% increase, about a 200% increase to about a 5,000% increase, about a 200% increase to about a 4,000% increase, about a 200% increase to about a 3,000% increase, about a 200% increase to about a 2,000% increase, about a 200% increase to about a 1,000% increase, about a 200% increase to about a 500% increase, about a 200% increase to about a 450% increase, about a 200% increase to about a 400% increase, about a 200% increase to about a 350% increase, about a 200% increase to about a 300% increase, about a 200% increase to about a 250% increase, about a 250% increase to about 10,000% increase, about a 250% increase to about a 9,000% increase, about a 250% increase to about a 8,000% increase, about a 250% increase to about a 7,000% increase, about a 250% increase to about a 6,000% increase, about a 250% increase to about a 5,000% increase, about a 250% increase to about a 4,000% increase, about a 250% increase to about a 3,000% increase, about a 250% increase to about a 2,000% increase, about a 250% increase to about a 1,000% increase, about a 250% increase to about a 500% increase, about a 250% increase to about a 450% increase, about a 250% increase to about a 400% increase, about a 250% increase to about a 350% increase, about a 250% increase to about a 300% increase, about a 300% increase to about 10,000% increase, about a 300% increase to about a 9,000% increase, about a 300% increase to about a 8,000% increase, about a 300% increase to about a 7,000% increase, about a 300% increase to about a 6,000% increase, about a 300% increase to about a 5,000% increase, about a 300% increase to about a 4,000% increase, about a 300% increase to about a 3,000% increase, about a 300% increase to about a 2,000% increase, about a 300% increase to about a 1,000% increase, about a 300% increase to about a 500% increase, about a 300% increase to about a 450% increase, about a 300% increase to about a 400% increase, about a 300% increase to about a 350% increase, about a 350% increase to about 10,000% increase, about a 350% increase to about a 9,000% increase, about a 350% increase to about a 8,000% increase, about a 350% increase to about a 7,000% increase, about a 350% increase to about a 6,000% increase, about a 350% increase to about a 5,000% increase, about a 350% increase to about a 4,000% increase, about a 350% increase to about a 3,000% increase, about a 350% increase to about a 2,000% increase, about a 350% increase to about a 1,000% increase, about a 350% increase to about a 500% increase, about a 350% increase to about a 450% increase, about a 350% increase to about a 400% increase, about a 400% increase to about 10,000% increase, about a 400% increase to about a 9,000% increase, about a 400% increase to about a 8,000% increase, about a 400% increase to about a 7,000% increase, about a 400% increase to about a 6,000% increase, about a 400% increase to about a 5,000% increase, about a 400% increase to about a 4,000% increase, about a 400% increase to about a 3,000% increase, about a 400% increase to about a 2,000% increase, about a 400% increase to about a 1,000% increase, about a 400% increase to about a 500% increase, about a 400% increase to about a 450% increase, about a 450% increase to about 10,000% increase, about a 450% increase to about a 9,000% increase, about a 450% increase to about a 8,000% increase, about a 450% increase to about a 7,000% increase, about a 450% increase to about a 6,000% increase, about a 450% increase to about a 5,000% increase, about a 450% increase to about a 4,000% increase, about a 450% increase to about a 3,000% increase, about a 450% increase to about a 2,000% increase, about a 450% increase to about a 1,000% increase, about a 450% increase to about a 500% increase, about a 500% increase to about 10,000% increase, about a 500% increase to about a 9,000% increase, about a 500% increase to about a 8,000% increase, about a 500% increase to about a 7,000% increase, about a 500% increase to about a 6,000% increase, about a 500% increase to about a 5,000% increase, about a 500% increase to about a 4,000% increase, about a 500% increase to about a 3,000% increase, about a 500% increase to about a 2,000% increase, about a 500% increase to about a 1,000% increase, about a 1,000% increase to about 10,000% increase, about a 1,000% increase to about a 9,000% increase, about a 1,000% increase to about a 8,000% increase, about a 1,000% increase to about a 7,000% increase, about a 1,000% increase to about a 6,000% increase, about a 1,000% increase to about a 5,000% increase, about a 1,000% increase to about a 4,000% increase, about a 1,000% increase to about a 3,000% increase, about a 1,000% increase to about a 2,000% increase, about a 2,000% increase to about 10,000% increase, about a 2,000% increase to about a 9,000% increase, about a 2,000% increase to about a 8,000% increase, about a 2,000% increase to about a 7,000% increase, about a 2,000% increase to about a 6,000% increase, about a 2,000% increase to about a 5,000% increase, about a 2,000% increase to about a 4,000% increase, about a 2,000% increase to about a 3,000% increase, about a 3,000% increase to about 10,000% increase, about a 3,000% increase to about a 9,000% increase, about a 3,000% increase to about a 8,000% increase, about a 3,000% increase to about a 7,000% increase, about a 3,000% increase to about a 6,000% increase, about a 3,000% increase to about a 5,000% increase, about a 3,000% increase to about a 4,000% increase, about a 4,000% increase to about 10,000% increase, about a 4,000% increase to about a 9,000% increase, about a 4,000% increase to about a 8,000% increase, about a 4,000% increase to about a 7,000% increase, about a 4,000% increase to about a 6,000% increase, about a 4,000% increase to about a 5,000% increase, about a 5,000% increase to about 10,000% increase, about a 5,000% increase to about a 9,000% increase, about a 5,000% increase to about a 8,000% increase, about a 5,000% increase to about a 7,000% increase, about a 5,000% increase to about a 6,000% increase, about a 6,000% increase to about 10,000% increase, about a 6,000% increase to about a 9,000% increase, about a 6,000% increase to about a 8,000% increase, about a 6,000% increase to about a 7,000% increase, about a 7,000% increase to about 10,000% increase, about a 7,000% increase to about a 9,000% increase, about a 7,000% increase to about a 8,000% increase, about a 8,000% increase to about 10,000% increase, about a 8,000% increase to about a 9,000% increase, or about a 9,000% increase to about 10,000%) in toxin liberation in the target mammalian cell (e.g., any of the target mammalian cells described herein) as compared to a composition including the same amount of a control ABPC (e.g., any of the exemplary control ABPCs described herein).

[0754] In some examples of any of the ABPCs described herein, a composition including the ABPC (e.g., any of the ABPCs described herein) can provide for an increase (e.g., a detectable increase) (e.g., at least a 0.1-fold increase, at least a 0.2-fold increase, at least a 0.3-fold increase, at least a 0.4-fold increase, at least a 0.5-fold increase, at least a 0.6-fold increase, at least a 0.7-fold increase, at least a 0.8-fold increase, at least a 0.9-fold increase, at least a 1.0-fold increase, at least a 1.2-fold increase, at least a 1.4-fold increase, at least a 1.5-fold increase, at least a 1.6-fold increase, at least a 1.8-fold increase, at least a 2.0-fold increase, at least a 2.2-fold increase, at least a 2.4-fold increase, at least a 2.5-fold increase, at least a 2.6-fold increase, at least a 2.8-fold increase, at least a 3.0-fold increase, at least a 3.5-fold increase, at least a 4.0-fold increase, at least a 4.5-fold increase, at least a 5.0-fold increase, at least a 5.5-fold increase, at least a 6.0-fold increase, at least a 6.5-fold increase, at least a 7.0-fold increase, at least a 7.5-fold increase, at least a 8.0-fold increase, at least a 8.5-fold increase, at least a 9.0-fold increase, at least a 9.5-fold increase, at least a 10-fold increase, at least a 15-fold increase, at least a 20-fold increase, at least a 25-fold increase, at least a 30-fold increase, at least a 35-fold increase, at least a 40-fold increase, at least a 45-fold increase, at least a 50-fold increase, at least a 55-fold increase, at least a 60-fold increase, at least a 65-fold increase, at least a 70-fold increase, at least a 75-fold increase, at least a 80-fold increase, at least a 85-fold increase, at least a 90-fold increase, at least a 95-fold increase, or at least a 100-fold increase, or about a 0.1-fold increase to about a 100-fold increase, about 0.1-fold increase to about a 90-fold increase, about 0.1-fold increase to about a 80-fold increase, about a 0.1-fold increase to about a 70-fold increase, about a 0.1-fold increase to about a 60-fold increase, about a 0.1-fold increase to about a 50-fold increase, about a 0.1-fold increase to about a 40-fold increase, about a 0.1-fold increase to about a 30-fold increase, about 0.1-fold increase to about 20-fold increase, about a 0.1-fold increase to about a 10-fold increase, about a 0.1-fold increase to about a 9.5-fold increase, about a 0.1-fold increase to about a 9.0-fold increase, about a 0.1-fold increase to about a 8.5-fold increase, about a 0.1-fold increase to about a 8.0-fold increase, about a 0.1-fold increase to about a 7.5-fold increase, about a 0.1-fold increase to about a 7.0-fold increase, about a 0.1-fold increase to about a 6.5-fold increase, about a 0.1-fold increase to about a 6.0-fold increase, about a 0.1-fold increase to about a 5.5-fold increase, about a 0.1-fold increase to about a 5.0-fold increase, about a 0.1-fold increase to about a 4.5-fold increase, about a 0.1-fold increase to about a 4.0-fold increase, about a 0.1-fold increase to about a 3.5-fold increase, about 0.1-fold increase to about a 3.0-fold increase, about a 0.1-fold increase to about a 2.8-fold increase, about a 0.1-fold increase to about a 2.6-fold increase, about a 0.1-fold increase to about a 2.5-fold increase, about a 0.1-fold increase to about a 2.4-fold increase, about a 0.1-fold increase to about a 2.2-fold increase, about a 0.1-fold increase to about a 2.0-fold increase, about a 0.1-fold increase to about a 1.8-fold increase, about a 0.1-fold increase to about a 1.6-fold increase, about a 0.1-fold increase to about a 1.5-fold increase, about a 0.1-fold increase to about a 1.4-fold increase, about a 0.1-fold increase to about a 1.2-fold increase, about a 0.1-fold increase to about a 1.0-fold increase, about a 0.1-fold increase to about a 0.9-fold increase, about a 0.1-fold increase to about a 0.8-fold increase, about a 0.1-fold increase to about a 0.7-fold increase, about a 0.1-fold increase to about a 0.6-fold increase, about a 0.1-fold increase to about a 0.5-fold increase, about a 0.1-fold increase to about a 0.4-fold increase, about a 0.1-fold increase to about a 0.3-fold increase, about a 0.2-fold increase to about a 100-fold increase, about 0.2-fold increase to about a 90-fold increase, about 0.2-fold increase to about a 80-fold increase, about a 0.2-fold increase to about a 70-fold increase, about a 0.2-fold increase to about a 60-fold increase, about a 0.2-fold increase to about a 50-fold increase, about a 0.2-fold increase to about a 40-fold increase, about a 0.2-fold increase to about a 30-fold increase, about 0.2-fold increase to about 20-fold increase, about a 0.2-fold increase to about a 10-fold increase, about a 0.2-fold increase to about a 9.5-fold increase, about a 0.2-fold increase to about a 9.0-fold increase, about a 0.2-fold increase to about a 8.5-fold increase, about a 0.2-fold increase to about a 8.0-fold increase, about a 0.2-fold increase to about a 7.5-fold increase, about a 0.2-fold increase to about a 7.0-fold increase, about a 0.2-fold increase to about a 6.5-fold increase, about a 0.2-fold increase to about a 6.0-fold increase, about a 0.2-fold increase to about a 5.5-fold increase, about a 0.2-fold increase to about a 5.0-fold increase, about a 0.2-fold increase to about a 4.5-fold increase, about a 0.2-fold increase to about a 4.0-fold increase, about a 0.2-fold increase to about a 3.5-fold increase, about 0.2-fold increase to about a 3.0-fold increase, about a 0.2-fold increase to about a 2.8-fold increase, about a 0.2-fold increase to about a 2.6-fold increase, about a 0.2-fold increase to about a 2.5-fold increase, about a 0.2-fold increase to about a 2.4-fold increase, about a 0.2-fold increase to about a 2.2-fold increase, about a 0.2-fold increase to about a 2.0-fold increase, about a 0.2-fold increase to about a 1.8-fold increase, about a 0.2-fold increase to about a 1.6-fold increase, about a 0.2-fold increase to about a 1.5-fold increase, about a 0.2-fold increase to about a 1.4-fold increase, about a 0.2-fold increase to about a 1.2-fold increase, about a 0.2-fold increase to about a 1.0-fold increase, about a 0.2-fold increase to about a 0.9-fold increase, about a 0.2-fold increase to about a 0.8-fold increase, about a 0.2-fold increase to about a 0.7-fold increase, about a 0.2-fold increase to about a 0.6-fold increase, about a 0.2-fold increase to about a 0.5-fold increase, about a 0.2-fold increase to about a 0.4-fold increase, about a 0.3-fold increase to about a 100-fold increase, about 0.3-fold increase to about a 90-fold increase, about 0.3-fold increase to about a 80-fold increase, about a 0.3-fold increase to about a 70-fold increase, about a 0.3-fold increase to about a 60-fold increase, about a 0.3-fold increase to about a 50-fold increase, about a 0.3-fold increase to about a 40-fold increase, about a 0.3-fold increase to about a 30-fold increase, about 0.3-fold increase to about 20-fold increase, about a 0.3-fold increase to about a 10-fold increase, about a 0.3-fold increase to about a 9.5-fold increase, about a 0.3-fold increase to about a 9.0-fold increase, about a 0.3-fold increase to about a 8.5-fold increase, about a 0.3-fold increase to about a 8.0-fold increase, about a 0.3-fold increase to about a 7.5-fold increase, about a 0.3-fold increase to about a 7.0-fold increase, about a 0.3-fold increase to about a 6.5-fold increase, about a 0.3-fold increase to about a 6.0-fold increase, about a 0.3-fold increase to about a 5.5-fold increase, about a 0.3-fold increase to about a 5.0-fold increase, about a 0.3-fold increase to about a 4.5-fold increase, about a 0.3-fold increase to about a 4.0-fold increase, about a 0.3-fold increase to about a 3.5-fold increase, about 0.3-fold increase to about a 3.0-fold increase, about a 0.3-fold increase to about a 2.8-fold increase, about a 0.3-fold increase to about a 2.6-fold increase, about a 0.3-fold increase to about a 2.5-fold increase, about a 0.3-fold increase to about a 2.4-fold increase, about a 0.3-fold increase to about a 2.2-fold increase, about a 0.3-fold increase to about a 2.0-fold increase, about a 0.3-fold increase to about a 1.8-fold increase, about a 0.3-fold increase to about a 1.6-fold increase, about a 0.3-fold increase to about a 1.5-fold increase, about a 0.3-fold increase to about a 1.4-fold increase, about a 0.3-fold increase to about a 1.2-fold increase, about a 0.3-fold increase to about a 1.0-fold increase, about a 0.3-fold increase to about a 0.9-fold increase, about a 0.3-fold increase to about a 0.8-fold increase, about a 0.3-fold increase to about a 0.7-fold increase, about a 0.3-fold increase to about a 0.6-fold increase, about a 0.3-fold increase to about a 0.5-fold increase, about a 0.4-fold increase to about a 100-fold increase, about 0.4-fold increase to about a 90-fold increase, about 0.4-fold increase to about a 80-fold increase, about a 0.4-fold increase to about a 70-fold increase, about a 0.4-fold increase to about a 60-fold increase, about a 0.4-fold increase to about a 50-fold increase, about a 0.4-fold increase to about a 40-fold increase, about a 0.4-fold increase to about a 30-fold increase, about 0.4-fold increase to about 20-fold increase, about a 0.4-fold increase to about a 10-fold increase, about a 0.4-fold increase to about a 9.5-fold increase, about a 0.4-fold increase to about a 9.0-fold increase, about a 0.4-fold increase to about a 8.5-fold increase, about a 0.4-fold increase to about a 8.0-fold increase, about a 0.4-fold increase to about a 7.5-fold increase, about a 0.4-fold increase to about a 7.0-fold increase, about a 0.4-fold increase to about a 6.5-fold increase, about a 0.4-fold increase to about a 6.0-fold increase, about a 0.4-fold increase to about a 5.5-fold increase, about a 0.4-fold increase to about a 5.0-fold increase, about a 0.4-fold increase to about a 4.5-fold increase, about a 0.4-fold increase to about a 4.0-fold increase, about a 0.4-fold increase to about a 3.5-fold increase, about 0.4-fold increase to about a 3.0-fold increase, about a 0.4-fold increase to about a 2.8-fold increase, about a 0.4-fold increase to about a 2.6-fold increase, about a 0.4-fold increase to about a 2.5-fold increase, about a 0.4-fold increase to about a 2.4-fold increase, about a 0.4-fold increase to about a 2.2-fold increase, about a 0.4-fold increase to about a 2.0-fold increase, about a 0.4-fold increase to about a 1.8-fold increase, about a 0.4-fold increase to about a 1.6-fold increase, about a 0.4-fold increase to about a 1.5-fold increase, about a 0.4-fold increase to about a 1.4-fold increase, about a 0.4-fold increase to about a 1.2-fold increase, about a 0.4-fold increase to about a 1.0-fold increase, about a 0.4-fold increase to about a 0.9-fold increase, about a 0.4-fold increase to about a 0.8-fold increase, about a 0.4-fold increase to about a 0.7-fold increase, about a 0.4-fold increase to about a 0.6-fold increase, about a 0.5-fold increase to about a 100-fold increase, about 0.5-fold increase to about a 90-fold increase, about 0.5-fold increase to about a 80-fold increase, about a 0.5-fold increase to about a 70-fold increase, about a 0.5-fold increase to about a 60-fold increase, about a 0.5-fold increase to about a 50-fold increase, about a 0.5-fold increase to about a 40-fold increase, about a 0.5-fold increase to about a 30-fold increase, about 0.5-fold increase to about 20-fold increase, about a 0.5-fold increase to about a 10-fold increase, about a 0.5-fold increase to about a 9.5-fold increase, about a 0.5-fold increase to about a 9.0-fold increase, about a 0.5-fold increase to about a 8.5-fold increase, about a 0.5-fold increase to about a 8.0-fold increase, about a 0.5-fold increase to about a 7.5-fold increase, about a 0.5-fold increase to about a 7.0-fold increase, about a 0.5-fold increase to about a 6.5-fold increase, about a 0.5-fold increase to about a 6.0-fold increase, about a 0.5-fold increase to about a 5.5-fold increase, about a 0.5-fold increase to about a 5.0-fold increase, about a 0.5-fold increase to about a 4.5-fold increase, about a 0.5-fold increase to about a 4.0-fold increase, about a 0.5-fold increase to about a 3.5-fold increase, about 0.5-fold increase to about a 3.0-fold increase, about a 0.5-fold increase to about a 2.8-fold increase, about a 0.5-fold increase to about a 2.6-fold increase, about a 0.5-fold increase to about a 2.5-fold increase, about a 0.5-fold increase to about a 2.4-fold increase, about a 0.5-fold increase to about a 2.2-fold increase, about a 0.5-fold increase to about a 2.0-fold increase, about a 0.5-fold increase to about a 1.8-fold increase, about a 0.5-fold increase to about a 1.6-fold increase, about a 0.5-fold increase to about a 1.5-fold increase, about a 0.5-fold increase to about a 1.4-fold increase, about a 0.5-fold increase to about a 1.2-fold increase, about a 0.5-fold increase to about a 1.0-fold increase, about a 0.5-fold increase to about a 0.9-fold increase, about a 0.5-fold increase to about a 0.8-fold increase, about a 0.5-fold increase to about a 0.7-fold increase, about a 0.6-fold increase to about a 100-fold increase, about 0.6-fold increase to about a 90-fold increase, about 0.6-fold increase to about a 80-fold increase, about a 0.6-fold increase to about a 70-fold increase, about a 0.6-fold increase to about a 60-fold increase, about a 0.6-fold increase to about a 50-fold increase, about a 0.6-fold increase to about a 40-fold increase, about a 0.6-fold increase to about a 30-fold increase, about 0.6-fold increase to about 20-fold increase, about a 0.6-fold increase to about a 10-fold increase, about a 0.6-fold increase to about a 9.5-fold increase, about a 0.6-fold increase to about a 9.0-fold increase, about a 0.6-fold increase to about a 8.5-fold increase, about a 0.6-fold increase to about a 8.0-fold increase, about a 0.6-fold increase to about a 7.5-fold increase, about a 0.6-fold increase to about a 7.0-fold increase, about a 0.6-fold increase to about a 6.5-fold increase, about a 0.6-fold increase to about a 6.0-fold increase, about a 0.6-fold increase to about a 5.5-fold increase, about a 0.6-fold increase to about a 5.0-fold increase, about a 0.6-fold increase to about a 4.5-fold increase, about a 0.6-fold increase to about a 4.0-fold increase, about a 0.6-fold increase to about a 3.5-fold increase, about 0.6-fold increase to about a 3.0-fold increase, about a 0.6-fold increase to about a 2.8-fold increase, about a 0.6-fold increase to about a 2.6-fold increase, about a 0.6-fold increase to about a 2.5-fold increase, about a 0.6-fold increase to about a 2.4-fold increase, about a 0.6-fold increase to about a 2.2-fold increase, about a 0.6-fold increase to about a 2.0-fold increase, about a 0.6-fold increase to about a 1.8-fold increase, about a 0.6-fold increase to about a 1.6-fold increase, about a 0.6-fold increase to about a 1.5-fold increase, about a 0.6-fold increase to about a 1.4-fold increase, about a 0.6-fold increase to about a 1.2-fold increase, about a 0.6-fold increase to about a 1.0-fold increase, about a 0.6-fold increase to about a 0.9-fold increase, about a 0.6-fold increase to about a 0.8-fold increase, about a 0.7-fold increase to about a 100-fold increase, about 0.7-fold increase to about a 90-fold increase, about 0.7-fold increase to about a 80-fold increase, about a 0.7-fold increase to about a 70-fold increase, about a 0.7-fold increase to about a 60-fold increase, about a 0.7-fold increase to about a 50-fold increase, about a 0.7-fold increase to about a 40-fold increase, about a 0.7-fold increase to about a 30-fold increase, about 0.7-fold increase to about 20-fold increase, about a 0.7-fold increase to about a 10-fold increase, about a 0.7-fold increase to about a 9.5-fold increase, about a 0.7-fold increase to about a 9.0-fold increase, about a 0.7-fold increase to about a 8.5-fold increase, about a 0.7-fold increase to about a 8.0-fold increase, about a 0.7-fold increase to about a 7.5-fold increase, about a 0.7-fold increase to about a 7.0-fold increase, about a 0.7-fold increase to about a 6.5-fold increase, about a 0.7-fold increase to about a 6.0-fold increase, about a 0.7-fold increase to about a 5.5-fold increase, about a 0.7-fold increase to about a 5.0-fold increase, about a 0.7-fold increase to about a 4.5-fold increase, about a 0.7-fold increase to about a 4.0-fold increase, about a 0.7-fold increase to about a 3.5-fold increase, about 0.7-fold increase to about a 3.0-fold increase, about a 0.7-fold increase to about a 2.8-fold increase, about a 0.7-fold increase to about a 2.6-fold increase, about a 0.7-fold increase to about a 2.5-fold increase, about a 0.7-fold increase to about a 2.4-fold increase, about a 0.7-fold increase to about a 2.2-fold increase, about a 0.7-fold increase to about a 2.0-fold increase, about a 0.7-fold increase to about a 1.8-fold increase, about a 0.7-fold increase to about a 1.6-fold increase, about a 0.7-fold increase to about a 1.5-fold increase, about a 0.7-fold increase to about a 1.4-fold increase, about a 0.7-fold increase to about a 1.2-fold increase, about a 0.7-fold increase to about a 1.0-fold increase, about a 0.7-fold increase to about a 0.9-fold increase, about a 0.8-fold increase to about a 100-fold increase, about 0.8-fold increase to about a 90-fold increase, about 0.8-fold increase to about a 80-fold increase, about a 0.8-fold increase to about a 70-fold increase, about a 0.8-fold increase to about a 60-fold increase, about a 0.8-fold increase to about a 50-fold increase, about a 0.8-fold increase to about a 40-fold increase, about a 0.8-fold increase to about a 30-fold increase, about 0.8-fold increase to about 20-fold increase, about a 0.8-fold increase to about a 10-fold increase, about a 0.8-fold increase to about a 9.5-fold increase, about a 0.8-fold increase to about a 9.0-fold increase, about a 0.8-fold increase to about a 8.5-fold increase, about a 0.8-fold increase to about a 8.0-fold increase, about a 0.8-fold increase to about a 7.5-fold increase, about a 0.8-fold increase to about a 7.0-fold increase, about a 0.8-fold increase to about a 6.5-fold increase, about a 0.8-fold increase to about a 6.0-fold increase, about a 0.8-fold increase to about a 5.5-fold increase, about a 0.8-fold increase to about a 5.0-fold increase, about a 0.8-fold increase to about a 4.5-fold increase, about a 0.8-fold increase to about a 4.0-fold increase, about a 0.8-fold increase to about a 3.5-fold increase, about 0.8-fold increase to about a 3.0-fold increase, about a 0.8-fold increase to about a 2.8-fold increase, about a 0.8-fold increase to about a 2.6-fold increase, about a 0.8-fold increase to about a 2.5-fold increase, about a 0.8-fold increase to about a 2.4-fold increase, about a 0.8-fold increase to about a 2.2-fold increase, about a 0.8-fold increase to about a 2.0-fold increase, about a 0.8-fold increase to about a 1.8-fold increase, about a 0.8-fold increase to about a 1.6-fold increase, about a 0.8-fold increase to about a 1.5-fold increase, about a 0.8-fold increase to about a 1.4-fold increase, about a 0.8-fold increase to about a 1.2-fold increase, about a 0.8-fold increase to about a 1.0-fold increase, about a 1.0-fold increase to about a 100-fold increase, about 1.0-fold increase to about a 90-fold increase, about 1.0-fold increase to about a 80-fold increase, about a 1.0-fold increase to about a 70-fold increase, about a 1.0-fold increase to about a 60-fold increase, about a 1.0-fold increase to about a 50-fold increase, about a 1.0-fold increase to about a 40-fold increase, about a 1.0-fold increase to about a 30-fold increase, about 1.0-fold increase to about 20-fold increase, about a 1.0-fold increase to about a 10-fold increase, about a 1.0-fold increase to about a 9.5-fold increase, about a 1.0-fold increase to about a 9.0-fold increase, about a 1.0-fold increase to about a 8.5-fold increase, about a 1.0-fold increase to about a 8.0-fold increase, about a 1.0-fold increase to about a 7.5-fold increase, about a 1.0-fold increase to about a 7.0-fold increase, about a 1.0-fold increase to about a 6.5-fold increase, about a 1.0-fold increase to about a 6.0-fold increase, about a 1.0-fold increase to about a 5.5-fold increase, about a 1.0-fold increase to about a 5.0-fold increase, about a 1.0-fold increase to about a 4.5-fold increase, about a 1.0-fold increase to about a 4.0-fold increase, about a 1.0-fold increase to about a 3.5-fold increase, about 1.0-fold increase to about a 3.0-fold increase, about a 1.0-fold increase to about a 2.8-fold increase, about a 1.0-fold increase to about a 2.6-fold increase, about a 1.0-fold increase to about a 2.5-fold increase, about a 1.0-fold increase to about a 2.4-fold increase, about a 1.0-fold increase to about a 2.2-fold increase, about a 1.0-fold increase to about a 2.0-fold increase, about a 1.0-fold increase to about a 1.8-fold increase, about a 1.0-fold increase to about a 1.6-fold increase, about a 1.0-fold increase to about a 1.5-fold increase, about a 1.0-fold increase to about a 1.4-fold increase, about a 1.0-fold increase to about a 1.2-fold increase, about a 1.2-fold increase to about a 100-fold increase, about 1.2-fold increase to about a 90-fold increase, about 1.2-fold increase to about a 80-fold increase, about a 1.2-fold increase to about a 70-fold increase, about a 1.2-fold increase to about a 60-fold increase, about a 1.2-fold increase to about a 50-fold increase, about a 1.2-fold increase to about a 40-fold increase, about a 1.2-fold increase to about a 30-fold increase, about 1.2-fold increase to about 20-fold increase, about a 1.2-fold increase to about a 10-fold increase, about a 1.2-fold increase to about a 9.5-fold increase, about a 1.2-fold increase to about a 9.0-fold increase, about a 1.2-fold increase to about a 8.5-fold increase, about a 1.2-fold increase to about a 8.0-fold increase, about a 1.2-fold increase to about a 7.5-fold increase, about a 1.2-fold increase to about a 7.0-fold increase, about a 1.2-fold increase to about a 6.5-fold increase, about a 1.2-fold increase to about a 6.0-fold increase, about a 1.2-fold increase to about a 5.5-fold increase, about a 1.2-fold increase to about a 5.0-fold increase, about a 1.2-fold increase to about a 4.5-fold increase, about a 1.2-fold increase to about a 4.0-fold increase, about a 1.2-fold increase to about a 3.5-fold increase, about 1.2-fold increase to about a 3.0-fold increase, about a 1.2-fold increase to about a 2.8-fold increase, about a 1.2-fold increase to about a 2.6-fold increase, about a 1.2-fold increase to about a 2.5-fold increase, about a 1.2-fold increase to about a 2.4-fold increase, about a 1.2-fold increase to about a 2.2-fold increase, about a 1.2-fold increase to about a 2.0-fold increase, about a 1.2-fold increase to about a 1.8-fold increase, about a 1.2-fold increase to about a 1.6-fold increase, about a 1.2-fold increase to about a 1.5-fold increase, about a 1.2-fold increase to about a 1.4-fold increase, about a 1.4-fold increase to about a 100-fold increase, about 1.4-fold increase to about a 90-fold increase, about 1.4-fold increase to about a 80-fold increase, about a 1.4-fold increase to about a 70-fold increase, about a 1.4-fold increase to about a 60-fold increase, about a 1.4-fold increase to about a 50-fold increase, about a 1.4-fold increase to about a 40-fold increase, about a 1.4-fold increase to about a 30-fold increase, about 1.4-fold increase to about 20-fold increase, about a 1.4-fold increase to about a 10-fold increase, about a 1.4-fold increase to about a 9.5-fold increase, about a 1.4-fold increase to about a 9.0-fold increase, about a 1.4-fold increase to about a 8.5-fold increase, about a 1.4-fold increase to about a 8.0-fold increase, about a 1.4-fold increase to about a 7.5-fold increase, about a 1.4-fold increase to about a 7.0-fold increase, about a 1.4-fold increase to about a 6.5-fold increase, about a 1.4-fold increase to about a 6.0-fold increase, about a 1.4-fold increase to about a 5.5-fold increase, about a 1.4-fold increase to about a 5.0-fold increase, about a 1.4-fold increase to about a 4.5-fold increase, about a 1.4-fold increase to about a 4.0-fold increase, about a 1.4-fold increase to about a 3.5-fold increase, about 1.4-fold increase to about a 3.0-fold increase, about a 1.4-fold increase to about a 2.8-fold increase, about a 1.4-fold increase to about a 2.6-fold increase, about a 1.4-fold increase to about a 2.5-fold increase, about a 1.4-fold increase to about a 2.4-fold increase, about a 1.4-fold increase to about a 2.2-fold increase, about a 1.4-fold increase to about a 2.0-fold increase, about a 1.4-fold increase to about a 1.8-fold increase, about a 1.4-fold increase to about a 1.6-fold increase, about a 1.6-fold increase to about a 10-fold increase, about a 1.6-fold increase to about a 100-fold increase, about 1.6-fold increase to about a 90-fold increase, about 1.6-fold increase to about a 80-fold increase, about a 1.6-fold increase to about a 70-fold increase, about a 1.6-fold increase to about a 60-fold increase, about a 1.6-fold increase to about a 50-fold increase, about a 1.6-fold increase to about a 40-fold increase, about a 1.6-fold increase to about a 30-fold increase, about 1.6-fold increase to about 20-fold increase, about a 1.6-fold increase to about a 9.5-fold increase, about a 1.6-fold increase to about a 9.0-fold increase, about a 1.6-fold increase to about a 8.5-fold increase, about a 1.6-fold increase to about a 8.0-fold increase, about a 1.6-fold increase to about a 7.5-fold increase, about a 1.6-fold increase to about a 7.0-fold increase, about a 1.6-fold increase to about a 6.5-fold increase, about a 1.6-fold increase to about a 6.0-fold increase, about a 1.6-fold increase to about a 5.5-fold increase, about a 1.6-fold increase to about a 5.0-fold increase, about a 1.6-fold increase to about a 4.5-fold increase, about a 1.6-fold increase to about a 4.0-fold increase, about a 1.6-fold increase to about a 3.5-fold increase, about 1.6-fold increase to about a 3.0-fold increase, about a 1.6-fold increase to about a 2.8-fold increase, about a 1.6-fold increase to about a 2.6-fold increase, about a 1.6-fold increase to about a 2.5-fold increase, about a 1.6-fold increase to about a 2.4-fold increase, about a 1.6-fold increase to about a 2.2-fold increase, about a 1.6-fold increase to about a 2.0-fold increase, about a 1.6-fold increase to about a 1.8-fold increase, about a 1.8-fold increase to about a 100-fold increase, about 1.8-fold increase to about a 90-fold increase, about 1.8-fold increase to about a 80-fold increase, about a 1.8-fold increase to about a 70-fold increase, about a 1.8-fold increase to about a 60-fold increase, about a 1.8-fold increase to about a 50-fold increase, about a 1.8-fold increase to about a 40-fold increase, about a 1.8-fold increase to about a 30-fold increase, about 1.8-fold increase to about 20-fold increase, about a 1.8-fold increase to about a 10-fold increase, about a 1.8-fold increase to about a 9.5-fold increase, about a 1.8-fold increase to about a 9.0-fold increase, about a 1.8-fold increase to about a 8.5-fold increase, about a 1.8-fold increase to about a 8.0-fold increase, about a 1.8-fold increase to about a 7.5-fold increase, about a 1.8-fold increase to about a 7.0-fold increase, about a 1.8-fold increase to about a 6.5-fold increase, about a 1.8-fold increase to about a 6.0-fold increase, about a 1.8-fold increase to about a 5.5-fold increase, about a 1.8-fold increase to about a 5.0-fold increase, about a 1.8-fold increase to about a 4.5-fold increase, about a 1.8-fold increase to about a 4.0-fold increase, about a 1.8-fold increase to about a 3.5-fold increase, about 1.8-fold increase to about a 3.0-fold increase, about a 1.8-fold increase to about a 2.8-fold increase, about a 1.8-fold increase to about a 2.6-fold increase, about a 1.8-fold increase to about a 2.5-fold increase, about a 1.8-fold increase to about a 2.4-fold increase, about a 1.8-fold increase to about a 2.2-fold increase, about a 1.8-fold increase to about a 2.0-fold increase, about a 2.0-fold increase to about a 100-fold increase, about 2.0-fold increase to about a 90-fold increase, about 2.0-fold increase to about a 80-fold increase, about a 2.0-fold increase to about a 70-fold increase, about a 2.0-fold increase to about a 60-fold increase, about a 2.0-fold increase to about a 50-fold increase, about a 2.0-fold increase to about a 40-fold increase, about a 2.0-fold increase to about a 30-fold increase, about 2.0-fold increase to about 20-fold increase, about a 2.0-fold increase to about a 10-fold increase, about a 2.0-fold increase to about a 9.5-fold increase, about a 2.0-fold increase to about a 9.0-fold increase, about a 2.0-fold increase to about a 8.5-fold increase, about a 2.0-fold increase to about a 8.0-fold increase, about a 2.0-fold increase to about a 7.5-fold increase, about a 2.0-fold increase to about a 7.0-fold increase, about a 2.0-fold increase to about a 6.5-fold increase, about a 2.0-fold increase to about a 6.0-fold increase, about a 2.0-fold increase to about a 5.5-fold increase, about a 2.0-fold increase to about a 5.0-fold increase, about a 2.0-fold increase to about a 4.5-fold increase, about a 2.0-fold increase to about a 4.0-fold increase, about a 2.0-fold increase to about a 3.5-fold increase, about 2.0-fold increase to about a 3.0-fold increase, about a 2.0-fold increase to about a 2.8-fold increase, about a 2.0-fold increase to about a 2.6-fold increase, about a 2.0-fold increase to about a 2.5-fold increase, about a 2.0-fold increase to about a 2.4-fold increase, about a 2.0-fold increase to about a 2.2-fold increase, about a 2.2-fold increase to about a 100-fold increase, about 2.2-fold increase to about a 90-fold increase, about 2.2-fold increase to about a 80-fold increase, about a 2.2-fold increase to about a 70-fold increase, about a 2.2-fold increase to about a 60-fold increase, about a 2.2-fold increase to about a 50-fold increase, about a 2.2-fold increase to about a 40-fold increase, about a 2.2-fold increase to about a 30-fold increase, about 2.2-fold increase to about 20-fold increase, about a 2.2-fold increase to about a 10-fold increase, about a 2.2-fold increase to about a 9.5-fold increase, about a 2.2-fold increase to about a 9.0-fold increase, about a 2.2-fold increase to about a 8.5-fold increase, about a 2.2-fold increase to about a 8.0-fold increase, about a 2.2-fold increase to about a 7.5-fold increase, about a 2.2-fold increase to about a 7.0-fold increase, about a 2.2-fold increase to about a 6.5-fold increase, about a 2.2-fold increase to about a 6.0-fold increase, about a 2.2-fold increase to about a 5.5-fold increase, about a 2.2-fold increase to about a 5.0-fold increase, about a 2.2-fold increase to about a 4.5-fold increase, about a 2.2-fold increase to about a 4.0-fold increase, about a 2.2-fold increase to about a 3.5-fold increase, about 2.2-fold increase to about a 3.0-fold increase, about a 2.2-fold increase to about a 2.8-fold increase, about a 2.2-fold increase to about a 2.6-fold increase, about a 2.2-fold increase to about a 2.5-fold increase, about a 2.2-fold increase to about a 2.4-fold increase, about a 2.4-fold increase to about a 100-fold increase, about 2.4-fold increase to about a 90-fold increase, about 2.4-fold increase to about a 80-fold increase, about a 2.4-fold increase to about a 70-fold increase, about a 2.4-fold increase to about a 60-fold increase, about a 2.4-fold increase to about a 50-fold increase, about a 2.4-fold increase to about a 40-fold increase, about a 2.4-fold increase to about a 30-fold increase, about 2.4-fold increase to about 20-fold increase, about a 2.4-fold increase to about a 10-fold increase, about a 2.4-fold increase to about a 9.5-fold increase, about a 2.4-fold increase to about a 9.0-fold increase, about a 2.4-fold increase to about a 8.5-fold increase, about a 2.4-fold increase to about a 8.0-fold increase, about a 2.4-fold increase to about a 7.5-fold increase, about a 2.4-fold increase to about a 7.0-fold increase, about a 2.4-fold increase to about a 6.5-fold increase, about a 2.4-fold increase to about a 6.0-fold increase, about a 2.4-fold increase to about a 5.5-fold increase, about a 2.4-fold increase to about a 5.0-fold increase, about a 2.4-fold increase to about a 4.5-fold increase, about a 2.4-fold increase to about a 4.0-fold increase, about a 2.4-fold increase to about a 3.5-fold increase, about 2.4-fold increase to about a 3.0-fold increase, about a 2.4-fold increase to about a 2.8-fold increase, about a 2.4-fold increase to about a 2.6-fold increase, about a 2.6-fold increase to about a 100-fold increase, about 2.6-fold increase to about a 90-fold increase, about 2.6-fold increase to about a 80-fold increase, about a 2.6-fold increase to about a 70-fold increase, about a 2.6-fold increase to about a 60-fold increase, about a 2.6-fold increase to about a 50-fold increase, about a 2.6-fold increase to about a 40-fold increase, about a 2.6-fold increase to about a 30-fold increase, about 2.6-fold increase to about 20-fold increase, about a 2.6-fold increase to about a 10-fold increase, about a 2.6-fold increase to about a 9.5-fold increase, about a 2.6-fold increase to about a 9.0-fold increase, about a 2.6-fold increase to about a 8.5-fold increase, about a 2.6-fold increase to about a 8.0-fold increase, about a 2.6-fold increase to about a 7.5-fold increase, about a 2.6-fold increase to about a 7.0-fold increase, about a 2.6-fold increase to about a 6.5-fold increase, about a 2.6-fold increase to about a 6.0-fold increase, about a 2.6-fold increase to about a 5.5-fold increase, about a 2.6-fold increase to about a 5.0-fold increase, about a 2.6-fold increase to about a 4.5-fold increase, about a 2.6-fold increase to about a 4.0-fold increase, about a 2.6-fold increase to about a 3.5-fold increase, about 2.6-fold increase to about a 3.0-fold increase, about a 2.6-fold increase to about a 2.8-fold increase, about a 2.8-fold increase to about a 100-fold increase, about 2.8-fold increase to about a 90-fold increase, about 2.8-fold increase to about a 80-fold increase, about a 2.8-fold increase to about a 70-fold increase, about a 2.8-fold increase to about a 60-fold increase, about a 2.8-fold increase to about a 50-fold increase, about a 2.8-fold increase to about a 40-fold increase, about a 2.8-fold increase to about a 30-fold increase, about 2.8-fold increase to about 20-fold increase, about a 2.8-fold increase to about a 10-fold increase, about a 2.8-fold increase to about a 9.5-fold increase, about a 2.8-fold increase to about a 9.0-fold increase, about a 2.8-fold increase to about a 8.5-fold increase, about a 2.8-fold increase to about a 8.0-fold increase, about a 2.8-fold increase to about a 7.5-fold increase, about a 2.8-fold increase to about a 7.0-fold increase, about a 2.8-fold increase to about a 6.5-fold increase, about a 2.8-fold increase to about a 6.0-fold increase, about a 2.8-fold increase to about a 5.5-fold increase, about a 2.8-fold increase to about a 5.0-fold increase, about a 2.8-fold increase to about a 4.5-fold increase, about a 2.8-fold increase to about a 4.0-fold increase, about a 2.8-fold increase to about a 3.5-fold increase, about 2.8-fold increase to about a 3.0-fold increase, about a 3.0-fold increase to about a 100-fold increase, about 3.0-fold increase to about a 90-fold increase, about 3.0-fold increase to about a 80-fold increase, about a 3.0-fold increase to about a 70-fold increase, about a 3.0-fold increase to about a 60-fold increase, about a 3.0-fold increase to about a 50-fold increase, about a 3.0-fold increase to about a 40-fold increase, about a 3.0-fold increase to about a 30-fold increase, about 3.0-fold increase to about 20-fold increase, about a 3.0-fold increase to about a 10-fold increase, about a 3.0-fold increase to about a 9.5-fold increase, about a 3.0-fold increase to about a 9.0-fold increase, about a 3.0-fold increase to about a 8.5-fold increase, about a 3.0-fold increase to about a 8.0-fold increase, about a 3.0-fold increase to about a 7.5-fold increase, about a 3.0-fold increase to about a 7.0-fold increase, about a 3.0-fold increase to about a 6.5-fold increase, about a 3.0-fold increase to about a 6.0-fold increase, about a 3.0-fold increase to about a 5.5-fold increase, about a 3.0-fold increase to about a 5.0-fold increase, about a 3.0-fold increase to about a 4.5-fold increase, about a 3.0-fold increase to about a 4.0-fold increase, about a 3.0-fold increase to about a 3.5-fold increase, about a 3.5-fold increase to about a 100-fold increase, about 3.5-fold increase to about a 90-fold increase, about 3.5-fold increase to about a 80-fold increase, about a 3.5-fold increase to about a 70-fold increase, about a 3.5-fold increase to about a 60-fold increase, about a 3.5-fold increase to about a 50-fold increase, about a 3.5-fold increase to about a 40-fold increase, about a 3.5-fold increase to about a 30-fold increase, about 3.5-fold increase to about 20-fold increase, about a 3.5-fold increase to about a 10-fold increase, about a 3.5-fold increase to about a 9.5-fold increase, about a 3.5-fold increase to about a 9.0-fold increase, about a 3.5-fold increase to about a 8.5-fold increase, about a 3.5-fold increase to about a 8.0-fold increase, about a 3.5-fold increase to about a 7.5-fold increase, about a 3.5-fold increase to about a 7.0-fold increase, about a 3.5-fold increase to about a 6.5-fold increase, about a 3.5-fold increase to about a 6.0-fold increase, about a 3.5-fold increase to about a 5.5-fold increase, about a 3.5-fold increase to about a 5.0-fold increase, about a 3.5-fold increase to about a 4.5-fold increase, about a 3.5-fold increase to about a 4.0-fold increase, about a 4.0-fold increase to about a 100-fold increase, about 4.0-fold increase to about a 90-fold increase, about 4.0-fold increase to about a 80-fold increase, about a 4.0-fold increase to about a 70-fold increase, about a 4.0-fold increase to about a 60-fold increase, about a 4.0-fold increase to about a 50-fold increase, about a 4.0-fold increase to about a 40-fold increase, about a 4.0-fold increase to about a 30-fold increase, about 4.0-fold increase to about 20-fold increase, about a 4.0-fold increase to about a 10-fold increase, about a 4.0-fold increase to about a 9.5-fold increase, about a 4.0-fold increase to about a 9.0-fold increase, about a 4.0-fold increase to about a 8.5-fold increase, about a 4.0-fold increase to about a 8.0-fold increase, about a 4.0-fold increase to about a 7.5-fold increase, about a 4.0-fold increase to about a 7.0-fold increase, about a 4.0-fold increase to about a 6.5-fold increase, about a 4.0-fold increase to about a 6.0-fold increase, about a 4.0-fold increase to about a 5.5-fold increase, about a 4.0-fold increase to about a 5.0-fold increase, about a 4.0-fold increase to about a 4.5-fold increase, about a 4.5-fold increase to about a 100-fold increase, about 4.5-fold increase to about a 90-fold increase, about 4.5-fold increase to about a 80-fold increase, about a 4.5-fold increase to about a 70-fold increase, about a 4.5-fold increase to about a 60-fold increase, about a 4.5-fold increase to about a 50-fold increase, about a 4.5-fold increase to about a 40-fold increase, about a 4.5-fold increase to about a 30-fold increase, about 4.5-fold increase to about 20-fold increase, about a 4.5-fold increase to about a 10-fold increase, about a 4.5-fold increase to about a 9.5-fold increase, about a 4.5-fold increase to about a 9.0-fold increase, about a 4.5-fold increase to about a 8.5-fold increase, about a 4.5-fold increase to about a 8.0-fold increase, about a 4.5-fold increase to about a 7.5-fold increase, about a 4.5-fold increase to about a 7.0-fold increase, about a 4.5-fold increase to about a 6.5-fold increase, about a 4.5-fold increase to about a 6.0-fold increase, about a 4.5-fold increase to about a 5.5-fold increase, about a 4.5-fold increase to about a 5.0-fold increase, about a 5.0-fold increase to about a 100-fold increase, about 5.0-fold increase to about a 90-fold increase, about 5.0-fold increase to about a 80-fold increase, about a 5.0-fold increase to about a 70-fold increase, about a 5.0-fold increase to about a 60-fold increase, about a 5.0-fold increase to about a 50-fold increase, about a 5.0-fold increase to about a 40-fold increase, about a 5.0-fold increase to about a 30-fold increase, about 5.0-fold increase to about 20-fold increase, about a 5.0-fold increase to about a 10-fold increase, about a 5.0-fold increase to about a 9.5-fold increase, about a 5.0-fold increase to about a 9.0-fold increase, about a 5.0-fold increase to about a 8.5-fold increase, about a 5.0-fold increase to about a 8.0-fold increase, about a 5.0-fold increase to about a 7.5-fold increase, about a 5.0-fold increase to about a 7.0-fold increase, about a 5.0-fold increase to about a 6.5-fold increase, about a 5.0-fold increase to about a 6.0-fold increase, about a 5.0-fold increase to about a 5.5-fold increase, about a 5.5-fold increase to about a 100-fold increase, about 5.5-fold increase to about a 90-fold increase, about 5.5-fold increase to about a 80-fold increase, about a 5.5-fold increase to about a 70-fold increase, about a 5.5-fold increase to about a 60-fold increase, about a 5.5-fold increase to about a 50-fold increase, about a 5.5-fold increase to about a 40-fold increase, about a 5.5-fold increase to about a 30-fold increase, about 5.5-fold increase to about 20-fold increase, about a 5.5-fold increase to about a 10-fold increase, about a 5.5-fold increase to about a 9.5-fold increase, about a 5.5-fold increase to about a 9.0-fold increase, about a 5.5-fold increase to about a 8.5-fold increase, about a 5.5-fold increase to about a 8.0-fold increase, about a 5.5-fold increase to about a 7.5-fold increase, about a 5.5-fold increase to about a 7.0-fold increase, about a 5.5-fold increase to about a 6.5-fold increase, about a 5.5-fold increase to about a 6.0-fold increase, about a 6.0-fold increase to about a 100-fold increase, about 6.0-fold increase to about a 90-fold increase, about 6.0-fold increase to about a 80-fold increase, about a 6.0-fold increase to about a 70-fold increase, about a 6.0-fold increase to about a 60-fold increase, about a 6.0-fold increase to about a 50-fold increase, about a 6.0-fold increase to about a 40-fold increase, about a 6.0-fold increase to about a 30-fold increase, about 6.0-fold increase to about 20-fold increase, about a 6.0-fold increase to about a 10-fold increase, about a 6.0-fold increase to about a 9.5-fold increase, about a 6.0-fold increase to about a 9.0-fold increase, about a 6.0-fold increase to about a 8.5-fold increase, about a 6.0-fold increase to about a 8.0-fold increase, about a 6.0-fold increase to about a 7.5-fold increase, about a 6.0-fold increase to about a 7.0-fold increase, about a 6.0-fold increase to about a 6.5-fold increase, about a 6.5-fold increase to about a 100-fold increase, about 6.5-fold increase to about a 90-fold increase, about 6.5-fold increase to about a 80-fold increase, about a 6.5-fold increase to about a 70-fold increase, about a 6.5-fold increase to about a 60-fold increase, about a 6.5-fold increase to about a 50-fold increase, about a 6.5-fold increase to about a 40-fold increase, about a 6.5-fold increase to about a 30-fold increase, about 6.5-fold increase to about 20-fold increase, about a 6.5-fold increase to about a 10-fold increase, about a 6.5-fold increase to about a 9.5-fold increase, about a 6.5-fold increase to about a 9.0-fold increase, about a 6.5-fold increase to about a 8.5-fold increase, about a 6.5-fold increase to about a 8.0-fold increase, about a 6.5-fold increase to about a 7.5-fold increase, about a 6.5-fold increase to about a 7.0-fold increase, about a 7.0-fold increase to about a 100-fold increase, about 7.0-fold increase to about a 90-fold increase, about 7.0-fold increase to about a 80-fold increase, about a 7.0-fold increase to about a 70-fold increase, about a 7.0-fold increase to about a 60-fold increase, about a 7.0-fold increase to about a 50-fold increase, about a 7.0-fold increase to about a 40-fold increase, about a 7.0-fold increase to about a 30-fold increase, about 7.0-fold increase to about 20-fold increase, about a 7.0-fold increase to about a 10-fold increase, about a 7.0-fold increase to about a 9.5-fold increase, about a 7.0-fold increase to about a 9.0-fold increase, about a 7.0-fold increase to about a 8.5-fold increase, about a 7.0-fold increase to about a 8.0-fold increase, about a 7.0-fold increase to about a 7.5-fold increase, about a 7.5-fold increase to about a 100-fold increase, about 7.5-fold increase to about a 90-fold increase, about 7.5-fold increase to about a 80-fold increase, about a 7.5-fold increase to about a 70-fold increase, about a 7.5-fold increase to about a 60-fold increase, about a 7.5-fold increase to about a 50-fold increase, about a 7.5-fold increase to about a 40-fold increase, about a 7.5-fold increase to about a 30-fold increase, about 7.5-fold increase to about 20-fold increase, about a 7.5-fold increase to about a 10-fold increase, about a 7.5-fold increase to about a 9.5-fold increase, about a 7.5-fold increase to about a 9.0-fold increase, about a 7.5-fold increase to about a 8.5-fold increase, about a 7.5-fold increase to about a 8.0-fold increase, about a 8.0-fold increase to about a 100-fold increase, about 8.0-fold increase to about a 90-fold increase, about 8.0-fold increase to about a 80-fold increase, about a 8.0-fold increase to about a 70-fold increase, about a 8.0-fold increase to about a 60-fold increase, about a 8.0-fold increase to about a 50-fold increase, about a 8.0-fold increase to about a 40-fold increase, about a 8.0-fold increase to about a 30-fold increase, about 8.0-fold increase to about 20-fold increase, about a 8.0-fold increase to about a 10-fold increase, about a 8.0-fold increase to about a 9.5-fold increase, about a 8.0-fold increase to about a 9.0-fold increase, about a 8.0-fold increase to about a 8.5-fold increase, about a 8.5-fold increase to about a 100-fold increase, about 8.5-fold increase to about a 90-fold increase, about 8.5-fold increase to about a 80-fold increase, about a 8.5-fold increase to about a 70-fold increase, about a 8.5-fold increase to about a 60-fold increase, about a 8.5-fold increase to about a 50-fold increase, about a 8.5-fold increase to about a 40-fold increase, about a 8.5-fold increase to about a 30-fold increase, about 8.5-fold increase to about 20-fold increase, about a 8.5-fold increase to about a 10-fold increase, about a 8.5-fold increase to about a 9.5-fold increase, about a 8.5-fold increase to about a 9.0-fold increase, about a 9.0-fold increase to about a 100-fold increase, about 9.0-fold increase to about a 90-fold increase, about 9.0-fold increase to about a 80-fold increase, about a 9.0-fold increase to about a 70-fold increase, about a 9.0-fold increase to about a 60-fold increase, about a 9.0-fold increase to about a 50-fold increase, about a 9.0-fold increase to about a 40-fold increase, about a 9.0-fold increase to about a 30-fold increase, about 9.0-fold increase to about 20-fold increase, about a 9.0-fold increase to about a 10-fold increase, about a 9.0-fold increase to about a 9.5-fold increase, about a 9.5-fold increase to about a 100-fold increase, about 9.5-fold increase to about a 90-fold increase, about 9.5-fold increase to about a 80-fold increase, about a 9.5-fold increase to about a 70-fold increase, about a 9.5-fold increase to about a 60-fold increase, about a 9.5-fold increase to about a 50-fold increase, about a 9.5-fold increase to about a 40-fold increase, about a 9.5-fold increase to about a 30-fold increase, about 9.5-fold increase to about 20-fold increase, about a 9.5-fold increase to about a 10-fold increase, about a 10-fold increase to about a 100-fold increase, about 10-fold increase to about a 90-fold increase, about 10-fold increase to about a 80-fold increase, about a 10-fold increase to about a 70-fold increase, about a 10-fold increase to about a 60-fold increase, about a 10-fold increase to about a 50-fold increase, about a 10-fold increase to about a 40-fold increase, about a 10-fold increase to about a 30-fold increase, about 10-fold increase to about 20-fold increase, about a 20-fold increase to about a 100-fold increase, about 20-fold increase to about a 90-fold increase, about 20-fold increase to about a 80-fold increase, about a 20-fold increase to about a 70-fold increase, about a 20-fold increase to about a 60-fold increase, about a 20-fold increase to about a 50-fold increase, about a 20-fold increase to about a 40-fold increase, about a 20-fold increase to about a 30-fold increase, about a 30-fold increase to about a 100-fold increase, about 30-fold increase to about a 90-fold increase, about 30-fold increase to about a 80-fold increase, about a 30-fold increase to about a 70-fold increase, about a 30-fold increase to about a 60-fold increase, about a 30-fold increase to about a 50-fold increase, about a 30-fold increase to about a 40-fold increase, about a 40-fold increase to about a 100-fold increase, about 40-fold increase to about a 90-fold increase, about 40-fold increase to about a 80-fold increase, about a 40-fold increase to about a 70-fold increase, about a 40-fold increase to about a 60-fold increase, about a 40-fold increase to about a 50-fold increase, about a 50-fold increase to about a 100-fold increase, about 50-fold increase to about a 90-fold increase, about 50-fold increase to about a 80-fold increase, about a 50-fold increase to about a 70-fold increase, about a 50-fold increase to about a 60-fold increase, about a 60-fold increase to about a 100-fold increase, about 60-fold increase to about a 90-fold increase, about 60-fold increase to about a 80-fold increase, about a 60-fold increase to about a 70-fold increase, about a 70-fold increase to about a 100-fold increase, about 70-fold increase to about a 90-fold increase, about 70-fold increase to about a 80-fold increase, about a 80-fold increase to about a 100-fold increase, about 80-fold increase to about a 90-fold increase, or about a 90-fold increase to about a 100-fold increase) in toxin liberation in the target mammalian cell (e.g., any of the target mammalian cells described herein) as compared to a composition including the same amount of a control ABPC (e.g., any of the exemplary control ABPCs described herein).

[0755] In some examples of any of the ABPCs described herein, a composition including the ABPC (e.g., any of the ABPCs described herein) can provide for an increase (e.g., a detectable increase) (e.g., at least a 1% increase, at least a 2% increase, at least a 5% increase, at least a 10% increase, at least a 15% increase, at least a 20% increase, at least a 25% increase, at least a 30% increase, at least a 35% increase, at least a 40% increase, at least a 45% increase, at least a 50% increase, at least a 55% increase, at least a 60% increase, at least a 65% increase, at least a 70% increase, at least a 75% increase, at least a 80% increase, at least a 85% increase, at least a 90% increase, at least a 95% increase, at least a 100% increase, at least a 120% increase, at least a 140% increase, at least a 160% increase, at least a 180% increase, at least a 200% increase, at least a 250% increase, at least a 300% increase, at least a 350% increase, at least a 400% increase, at least a 450% increase, at least a 500% increase, at least a 1,000% increase, at least a 2,000% increase, at least a 3,000% increase, at least a 4,000% increase, at least a 5,000% increase, at least a 6,000% increase, at least a 7,000% increase, at least a 8,000% increase, at a least a 9,000% increase, or at least a 10,000% increase, or about a 1% increase to about a 10,000% increase (e.g., or any of the subranges of this range described herein)) in target mammalian cell killing (e.g., any of the exemplary target mammalian cells described herein) as compared to a composition including the same amount of a control ABPC (e.g., any of the exemplary control ABPCs described herein).

[0756] In some examples of any of the ABPCs described herein, a composition including the ABPC (e.g., any of the ABPCs described herein) can provide for an increase (e.g., a detectable increase) (e.g., at least a 0.1-fold increase, at least a 0.2-fold increase, at least a 0.3-fold increase, at least a 0.4-fold increase, at least a 0.5-fold increase, at least a 0.6-fold increase, at least a 0.7-fold increase, at least a 0.8-fold increase, at least a 0.9-fold increase, at least a 1.0-fold increase, at least a 1.2-fold increase, at least a 1.4-fold increase, at least a 1.5-fold increase, at least a 1.6-fold increase, at least a 1.8-fold increase, at least a 2.0-fold increase, at least a 2.2-fold increase, at least a 2.4-fold increase, at least a 2.5-fold increase, at least a 2.6-fold increase, at least a 2.8-fold increase, at least a 3.0-fold increase, at least a 3.5-fold increase, at least a 4.0-fold increase, at least a 4.5-fold increase, at least a 5.0-fold increase, at least a 5.5-fold increase, at least a 6.0-fold increase, at least a 6.5-fold increase, at least a 7.0-fold increase, at least a 7.5-fold increase, at least a 8.0-fold increase, at least a 8.5-fold increase, at least a 9.0-fold increase, at least a 9.5-fold increase, at least a 10-fold increase, at least a 15-fold increase, at least a 20-fold increase, at least a 25-fold increase, at least a 30-fold increase, at least a 35-fold increase, at least a 40-fold increase, at least a 40-fold increase, at least a 45-fold increase, at least a 50-fold increase, at least a 55-fold increase, at least a 60-fold increase, at least a 65-fold increase, at least a 70-fold increase, at least a 80-fold increase, at least a 85-fold increase, at least a 90-fold increase, at least a 95-fold increase, or at least a 100-fold increase, or about a 0.1-fold increase to about a 100-fold increase (or any of the subranges of this range described herein)) in target mammalian cell killing (e.g., any of the exemplary target mammalian cells described herein) as compared to a composition including the same amount of a control ABPC (e.g., any of the exemplary control ABPCs described herein).

[0757] In some examples of any of the ABPCs described herein, a composition including any of the ABPCs described herein (e.g., upon contacting target mammalian cells presenting MET on their surface) results in decreased (e.g., at least a 1% decrease, at least a 5% decrease, at least a 10% decrease, at least a 15% decrease, at least a 20% decrease, at least a 25% decrease, at least a 30% decrease, at least a 35% decrease, at least a 40% decrease, at least a 45% decrease, at least a 50% decrease, at least a 55% decrease, at least a 60% decrease, at least a 65% decrease, at least a 70% decrease, at least a 75% decrease, at least a 80% decrease, at least a 85% decrease, at least a 90% decrease, at least a 95% decrease, or at least a 99% decrease, about a 1% decrease to about a 99% decrease, or any of the subranges of this range described herein) IC50 (for target mammalian cell killing) as compared to the IC50 for a composition including the same amount of a control ABPC (e.g., any of the control ABPCs described herein) (e.g., upon contacting the same target mammalian cells).

[0758] In some examples of any of the ABPCs described herein, a composition including any of the ABPCs described herein (e.g., upon contacting target mammalian cells presenting MET on their surface) can provide for an increase (e.g., at least a 0.1-fold increase, at least a 0.2-fold increase, at least a 0.4-fold increase, at least a 0.6-fold increase, at least a 0.8-fold increase, at least a 1-fold increase, at least a 2-fold increase, at least a 5-fold increase, at least a 10-fold increase, at least a 15-fold increase, at least a 20-fold increase, at least a 25-fold increase, at least a 30-fold increase, at least a 35-fold increase, at least a 40-fold increase, at least a 45-fold increase, at least a 50-fold increase, at least a 55-fold increase, at least a 60-fold increase, at least a 65-fold increase, at least a 70-fold increase, at least a 75-fold increase, at least a 80-fold increase, at least a 85-fold increase, at least a 90-fold increase, at least a 95-fold increase, or at least a 100-fold increase, or about a 0.1-fold increase to about 500-fold increase (or any of the subranges of this range described herein) in the ratio of K_{D} on target mammalian cells presenting MET on their surface at a neutral pH (a pH of about 7.0 to about 8.0) to IC50 at the neutral pH on the same target cells, e.g., as compared to a control ABPC (e.g., any of the exemplary control ABPCs described herein).

[0759] In some examples of any of the ABPCs described herein, a composition including the ABPC (e.g., any of the ABPCs described herein) can provide for an increase (e.g., a detectable increase) (e.g., at least a 1% increase, at least a 2% increase, at least a 5% increase, at least a 10% increase, at least a 15% increase, at least a 20% increase, at least a 25% increase, at least a 30% increase, at least a 35% increase, at least a 40% increase, at least a 45% increase, at least a 50% increase, at least a 55% increase, at least a 60% increase, at least a 65% increase, at least a 70% increase, at least a 75% increase, at least a 80% increase, at least a 85% increase, at least a 90% increase, at least a 95% increase, at least a 100% increase, at least a 120% increase, at least a 140% increase, at least a 160% increase, at least a 180% increase, at least a 200% increase, at least a 250% increase, at least a 300% increase, at least a 350% increase, at least a 400% increase, at least a 450% increase, at least a 500% increase, at least a 1,000% increase, at least a 2,000% increase, at least a 3,000% increase, at least a 4,000% increase, at least a 5,000% increase, at least a 6,000% increase, at least a 7,000% increase, at least a 8,000% increase, at least a 9,000% increase, or at least a 10,000% increase, or about a 1% increase to about a 10,000% increase (e.g., or any of the subranges of this range described herein)) in endolysosomal delivery in the target mammalian cell (e.g., any of the exemplary target mammalian cells described herein) as compared to a composition including the same amount of a control ABPC (e.g., any of the exemplary control ABPCs described herein).

[0760] In some examples of any of the ABPCs described herein, a composition including the ABPC (e.g., any of the ABPCs described herein) can provide for an increase (e.g., a detectable increase) (e.g., at least a 0.1-fold increase, at least a 0.2-fold increase, at least a 0.3-fold increase, at least a 0.4-fold increase, at least a 0.5-fold increase, at least a 0.6-fold increase, at least a 0.7-fold increase, at least a 0.8-fold increase, at least a 0.9-fold increase, at least a 1.0-fold increase, at least a 1.2-fold increase, at least a 1.4-fold increase, at least a 1.5-fold increase, at least a 1.6-fold increase, at least a 1.8-fold increase, at least a 2.0-fold increase, at least a 2.2-fold increase, at least a 2.4-fold increase, at least a 2.5-fold increase, at least a 2.6-fold increase, at least a 2.8-fold increase, at least a 3.0-fold increase, at least a 3.5-fold increase, at least a 4.0-fold increase, at least a 4.5-fold increase, at least a 5.0-fold increase, at least a 5.5-fold increase, at least a 6.0-fold increase, at least a 6.5-fold increase, at least a 7.0-fold increase, at least a 7.5-fold increase, at least a 8.0-fold increase, at least a 8.5-fold increase, at least a 9.0-fold increase, at least a 9.5-fold increase, at least a 10-fold increase, at least a 15-fold increase, at least a 20-fold increase, at least a 25-fold increase, at least a 30-fold increase, at least a 35-fold increase, at least a 40-fold increase, at least a 45-fold increase, at least a 50-fold increase, at least a 55-fold increase, at least a 60-fold increase, at least a 65-fold increase, at least a 70-fold increase, at least a 75-fold increase, at least a 80-fold increase, at least a 85-fold increase, at least a 90-fold increase, at least a 95-fold increase, or at least a 100-fold increase, or about a 0.1-fold increase to about a 100-fold increase (or any of the subranges of this range described herein)) in endolysosomal delivery in the target mammalian cell (e.g., any of the exemplary target mammalian cells described herein) as compared to a composition including the same amount of a control ABPC (e.g., any of the exemplary control ABPCs described herein).

[0761] In examples of any of the ABPCs described herein, the target mammalian cell does not express an FcRn receptor, or expresses a lower (e.g., a detectably lower) level (e.g., at least a 1% decreased, at least a 2% decreased, at least a 5% decreased, at least a 10% decrease, at least a 15% decreased, at least a 20% decreased, at least a 25% decreased, at least a 30% decreased, at least a 35% decreased, at least a 40% decreased, at least a 45% decreased, at least a 50% decreased, at least a 55% decreased, at least a 60% decreased, at least a 65% decreased, at least a 70% decreased, at least a 75% decreased, at least a 80% decreased, at least a 85% decreased, at least a 90% decreased, at least a 95% decreased, or at least a 99% decreased level) of FcRn receptor as compared to a FcRn expressing control cell (e.g., HUVEC—ThermoFisher #C0035C). In some examples of any of the ABPCs described herein, the target mammalian cell is a cancer cell. In some examples of any of the ABPCs described herein, the ABPC is cytotoxic or cytostatic to the target mammalian cell.

[0762] In some examples of any of the ABPCs described herein, a composition including any of the ABPCs described herein (e.g., upon administration to a subject) results in less (e.g., a 1% decrease to about a 99% decrease, or any of the subranges of this range described herein) of a reduction in the level of MET presented on the surface of the target cell as compared to a composition including the same amount of a control ABPC (e.g., any of the control ABPCs described herein). In some examples of any of the ABPCs described herein, the composition does not result in a detectable reduction in the level of the MET presented on the surface of the target mammalian cell.

[0763] In some examples of any of the ABPCs described herein, the ABPC is cross-reactive with a non-human primate MET and a human MET. In some examples of any of the ABPCs described herein, the ABPC is cross-reactive with a non-human primate MET, a human MET, and one or both of rat MET and a mouse MET. In some examples of any of the ABPCs described herein, the ABPC is cross-reactive with a non-human primate MET, a human MET, a rat MET, and a mouse MET. In some examples of any of the ABPCs described herein, the ABPC is cross-reactive with mouse MET and rat MET. In some examples of any of the ABPCs described herein, the antigen-binding domain binds to an epitope of MET that is present on the surface of cells from an Old World Monkey.

[0764] Some examples of any of the ABPCs described herein can further include a second antigen-binding domain (e.g., any of the exemplary antigen-binding domains described herein).

[0765] Non-limiting aspects of these methods are described below, and can be used in any combination without limitation. Additional aspects of these methods are known in the art.

### MET or Epitope of MET

[0766] MET Proto-Oncogene, Receptor Tyrosine Kinase (MET) is a tumor antigen that is known in the art, and is the target of therapeutic antibodies in oncology (Wang J et al (2017) ABBV-399, a c-Met Antibody-Drug Conjugate that Targets Both MET-Amplified and c-Met-Overexpressing Tumors, Irrespective of MET Pathway Dependence, Clin Cancer Res, 23:992-1000). The sequence of the mature Human MET can be found in SEQ ID NO: 9. The sequence of the cDNA encoding the mature Human MET can be found in SEQ ID NO: 10. The sequence of the extracellular domain of MET can be found in SEQ ID NO: 11. The sequence of the cDNA encoding the extracellular domain of MET can be found in SEQ ID NO: 12.

### Antigen-Binding Protein Constructs

[0767] Any of the antigen-binding protein constructs (ABPCs) described herein can be a single polypeptide, or can include two, three, four, five, six, seven, eight, nine, or ten (the same or different) polypeptides. In some embodiments where the ABPC is a single polypeptide, the ABPC can include a single antigen-binding domain or two antigen-binding domains. In some embodiments where the ABPC is a single polypeptide and includes two antigen-binding domains, the first and second antigen-binding domains can be identical or different from each other (and can specifically bind to the same or different antigens or epitopes).

[0768] In some embodiments where the ABPC is a single polypeptide, the first antigen-binding domain and the second antigen-binding domain (if present) can each be independently selected from the group of: a VH domain, a VHH domain, a VNAR domain, and a scFv. In some embodiments where the ABPC is a single polypeptide, the antigen-binding protein construct can be a BiTe, a (scFv)2, a nanobody, a nanobody-HSA, a DART, a TandAb, a scDiabody, a scDiabody-CH3, scFv-CH-CL-scFv, a HSAbody, scDiabody-HAS, a tandem-scFv, an Adnectin, a DARPin, a fibronectin, and a DEP conjugate. Additional examples of antigen-binding domains that can be used when the ABPC is a single polypeptide are known in the art.

[0769] A V_{H}H domain is a single monomeric variable antibody domain that can be found in camelids. A V_{NAR} domain is a single monomeric variable antibody domain that can be found in cartilaginous fish. Non-limiting aspects of V_{H}H domains and V_{NAR} domains are described in, e.g., Cromie et al., Curr. Top. Med. Chem. 15:2543-2557, 2016; De Genst et al., Dev. Comp. Immunol. 30:187-198, 2006; De Meyer et al., Trends Biotechnol. 32:263-270, 2014; Kijanka et al., Nanomedicine 10:161-174, 2015; Kovaleva et al., Expert. Opin. Biol. Ther. 14:1527-1539, 2014; Krah et al., Immunopharmacol. Immunotoxicol. 38:21-28, 2016; Mujic-Delic et al., Trends Pharmacol. Sci. 35:247-255, 2014; Muyldermans, J. Biotechnol. 74:277-302, 2001; Muyldermans et al., Trends Biochem. Sci. 26:230-235, 2001; Muyldermans, Ann. Rev. Biochem. 82:775-797, 2013; Rahbarizadeh et al., Immunol. Invest. 40:299-338, 2011; Van Audenhove et al., EBioMedicine 8:40-48, 2016; Van Bockstaele et al., Curr. Opin. Investig. Drugs 10:1212-1224, 2009; Vincke et al., Methods Mol. Biol. 911:15-26, 2012; and Wesolowski et al., Med. Microbiol. Immunol. 198:157-174, 2009.

[0770] In some embodiments where the ABPC is a single polypeptide and includes two antigen-binding domains, the first antigen-binding domain and the second antigen-binding domain can both be VHH domains, or at least one antigen-binding domain can be a VHH domain. In some embodiments where the ABPC is a single polypeptide and includes two antigen-binding domains, the first antigen-binding domain and the second antigen-binding domain are both V_{NAR} domains, or at least one antigen-binding domain is a V_{NAR} domain. In some embodiments where the ABPC is a single polypeptide, the first antigen-binding domain is a scFv domain. In some embodiments where the ABPC is a single polypeptide and includes two antigen-binding domains, the first antigen-binding domain and the second antigen-binding domain can both be scFv domains, or at least one antigen-binding domain can be a scFv domain.

[0771] In some embodiments, the ABPC can include two or more polypeptides (e.g., two, three, four, five, six, seven, eight, nine, or ten polypeptides). In some embodiments where the ABPC includes two or more polypeptides, two, three, four, five or six of the polypeptides of the two or more polypeptides can be identical.

[0772] In some embodiments where the ABPC includes two or more polypeptides (e.g., two, three, four, five, six, seven, eight, nine, or ten polypeptides), two or more of the polypeptides of the ABPC can assemble (e.g., non-covalently assemble) to form one or more antigen-binding domains, e.g., an antigen-binding fragment of an antibody (e.g., any of the antigen-binding fragments of an antibody described herein), a VHH-scAb, a VHH-Fab, a Dual scFab, a F(ab′)2, a diabody, a crossMab, a DAF (two-in-one), a DAF (four-in-one), a DutaMab, a DT-IgG, a knobs-in-holes common light chain, a knobs-in-holes assembly, a charge pair, a Fab-arm exchange, a SEEDbody, a LUZ-Y, a Fcab, a κλ-body, an orthogonal Fab, a DVD-IgG, a IgG(H)-scFv, a scFv-(H)IgG, IgG(L)-scFv, scFv-(L)IgG, IgG(L,H)-Fv, IgG(H)-V, V(H)-IgG, IgG(L)-V, V(L)-IgG, KIH IgG-scFab, 2scFv-IgG, IgG-2scFv, scFv4-Ig, Zybody, DVI-IgG, Diabody-CH3, a triple body, a miniantibody, a minibody, a TriBi minibody, scFv-CH3 KIH, Fab-scFv, a F(ab′)2-scFv2, a scFv-KIH, a Fab-scFv-Fc, a tetravalent HCAb, a scDiabody-Fc, a Diabody-Fc, a tandem scFv-Fc, a VHH-Fc, a tandem VHH-Fc, a VHH-Fc KiH, a Fab-VHH-Fc, an Intrabody, a dock and lock, an ImmTAC, an IgG-IgG conjugate, a Cov-X-Body, a scFv1-PEG-scFv2, an Adnectin, a DARPin, a fibronectin, and a DEP conjugate. See, e.g., Spiess et al., Mol. Immunol. 67:95-106, 2015, incorporated in its entirety herewith, for a description of these elements. Non-limiting examples of an antigen-binding fragment of an antibody include an Fv fragment, a Fab fragment, a F(ab′)2 fragment, and a Fab′ fragment. Additional examples of an antigen-binding fragment of an antibody is an antigen-binding fragment of an IgG (e.g., an antigen-binding fragment of IgG1, IgG2, IgG3, or IgG4) (e.g., an antigen-binding fragment of a human or humanized IgG, e.g., human or humanized IgG1, IgG2, IgG3, or IgG4); an antigen-binding fragment of an IgA (e.g., an antigen-binding fragment of IgA1 or IgA2) (e.g., an antigen-binding fragment of a human or humanized IgA, e.g., a human or humanized IgA1 or IgA2); an antigen-binding fragment of an IgD (e.g., an antigen-binding fragment of a human or humanized IgD); an antigen-binding fragment of an IgE (e.g., an antigen-binding fragment of a human or humanized IgE); or an antigen-binding fragment of an IgM (e.g., an antigen-binding fragment of a human or humanized IgM).

[0773] A “Fv” fragment includes a non-covalently-linked dimer of one heavy chain variable domain and one light chain variable domain.

[0774] A “Fab” fragment includes, the constant domain of the light chain and the first constant domain (Cm) of the heavy chain, in addition to the heavy and light chain variable domains of the Fv fragment.

[0775] A “F(ab′)₂” fragment includes two Fab fragments joined, near the hinge region, by disulfide bonds.

[0776] A “dual variable domain immunoglobulin” or “DVD-Ig” refers to multivalent and multispecific binding proteins as described, e.g., in DiGiammarino et al., Methods Mol. Biol. 899:145-156, 2012; Jakob et al., MABs 5:358-363, 2013; and U.S. Pat. Nos. 7,612,181; 8,258,268; 8,586,714; 8,716,450; 8,722,855; 8,735,546; and 8,822,645, each of which is incorporated by reference in its entirety.

[0777] DARTs are described in, e.g., Garber, Nature Reviews Drug Discovery 13:799-801, 2014.

[0778] Additional aspects of ABPCs are known in the art.

### Antigen-Binding Domains

[0779] In some embodiments of any of the antigen-binding protein constructs (ABPCs) described herein, the dissociation rate of the first antigen-binding domain (and optionally the second antigen-binding domain, if present) at a pH of about 4.0 to about 6.5 (e.g., about 4.0 to about 6.4, about 4.0 to about 6.3, about 4.0 to about 6.2, about 4.0 to about 6.1, about 4.0 to about 6.0, about 4.0 to about 5.9, about 4.0 to about 5.8, about 4.0 to about 5.7, about 4.0 to about 5.6, about 4.0 to about 5.5, about 4.0 to about 5.4, about 4.0 to about 5.3, about 4.0 to about 5.2, about 4.0 to about 5.1, about 4.0 to about 5.0, about 4.0 to about 4.9, about 4.0 to about 4.8, about 4.0 to about 4.7, about 4.0 to about 4.6, about 4.0 to about 4.5, about 4.0 to about 4.4, about 4.0 to about 4.3, about 4.0 to about 4.2, about 4.0 to about 4.1, about 4.1 to about 6.5, about 4.1 to about 6.4, about 4.1 to about 6.3, about 4.1 to about 6.2, about 4.1 to about 6.1, about 4.1 to about 6.0, about 4.1 to about 5.9, about 4.1 to about 5.8, about 4.1 to about 5.7, about 4.1 to about 5.6, about 4.1 to about 5.5, about 4.1 to about 5.4, about 4.1 to about 5.3, about 4.1 to about 5.2, about 4.1 to about 5.1, about 4.1 to about 5.0, about 4.1 to about 4.9, about 4.1 to about 4.8, about 4.1 to about 4.7, about 4.1 to about 4.6, about 4.1 to about 4.5, about 4.1 to about 4.4, about 4.1 to about 4.3, about 4.1 to about 4.2, about 4.2 to about 6.5, about 4.2 to about 6.4, about 4.2 to about 6.3, about 4.2 to about 6.2, about 4.2 to about 6.1, about 4.2 to about 6.0, about 4.2 to about 5.9, about 4.2 to about 5.8, about 4.2 to about 5.7, about 4.2 to about 5.6, about 4.2 to about 5.5, about 4.2 to about 5.4, about 4.2 to about 5.3, about 4.2 to about 5.2, about 4.2 to about 5.1, about 4.2 to about 5.0, about 4.2 to about 4.9, about 4.2 to about 4.8, about 4.2 to about 4.7, about 4.2 to about 4.6, about 4.2 to about 4.5, about 4.2 to about 4.4, about 4.2 to about 4.3, about 4.3 to about 6.5, about 4.3 to about 6.4, about 4.3 to about 6.3, about 4.3 to about 6.2, about 4.3 to about 6.1, about 4.3 to about 6.0, about 4.3 to about 5.9, about 4.3 to about 5.8, about 4.3 to about 5.7, about 4.3 to about 5.6, about 4.3 to about 5.5, about 4.3 to about 5.4, about 4.3 to about 5.3, about 4.3 to about 5.2, about 4.3 to about 5.1, about 4.3 to about 5.0, about 4.3 to about 4.9, about 4.3 to about 4.8, about 4.3 to about 4.7, about 4.3 to about 4.6, about 4.3 to about 4.5, about 4.3 to about 4.4, about 4.4 to about 6.5, about 4.4 to about 6.4, about 4.4 to about 6.3, about 4.4 to about 6.2, about 4.4 to about 6.1, about 4.4 to about 6.0, about 4.4 to about 5.9, about 4.4 to about 5.8, about 4.4 to about 5.7, about 4.4 to about 5.6, about 4.4 to about 5.5, about 4.4 to about 5.4, about 4.4 to about 5.3, about 4.4 to about 5.2, about 4.4 to about 5.1, about 4.4 to about 5.0, about 4.4 to about 4.9, about 4.4 to about 4.8, about 4.4 to about 4.7, about 4.4 to about 4.6, about 4.4 to about 4.5, about 4.5 to about 6.5, about 4.5 to about 6.4, about 4.5 to about 6.3, about 4.5 to about 6.2, about 4.5 to about 6.1, about 4.5 to about 6.0, about 4.5 to about 5.9, about 4.5 to about 5.8, about 4.5 to about 5.7, about 4.5 to about 5.6, about 4.5 to about 5.5, about 4.5 to about 5.4, about 4.5 to about 5.3, about 4.5 to about 5.2, about 4.5 to about 5.1, about 4.5 to about 5.0, about 4.5 to about 4.9, about 4.5 to about 4.8, about 4.5 to about 4.7, about 4.5 to about 4.6, about 4.6 to about 6.5, about 4.6 to about 6.4, about 4.6 to about 6.3, about 4.6 to about 6.2, about 4.6 to about 6.1, about 4.6 to about 6.0, about 4.6 to about 5.9, about 4.6 to about 5.8, about 4.6 to about 5.7, about 4.6 to about 5.6, about 4.6 to about 5.5, about 4.6 to about 5.4, about 4.6 to about 5.3, about 4.6 to about 5.2, about 4.6 to about 5.1, about 4.6 to about 5.0, about 4.6 to about 4.9, about 4.6 to about 4.8, about 4.6 to about 4.7, about 4.7 to about 6.5, about 4.7 to about 6.4, about 4.7 to about 6.3, about 4.7 to about 6.2, about 4.7 to about 6.1, about 4.7 to about 6.0, about 4.7 to about 5.9, about 4.7 to about 5.8, about 4.7 to about 5.7, about 4.7 to about 5.6, about 4.7 to about 5.5, about 4.7 to about 5.4, about 4.7 to about 5.3, about 4.7 to about 5.2, about 4.7 to about 5.1, about 4.7 to about 5.0, about 4.7 to about 4.9, about 4.7 to about 4.8, about 4.8 to about 6.5, about 4.8 to about 6.4, about 4.8 to about 6.3, about 4.8 to about 6.2, about 4.8 to about 6.1, about 4.8 to about 6.0, about 4.8 to about 5.9, about 4.8 to about 5.8, about 4.8 to about 5.7, about 4.8 to about 5.6, about 4.8 to about 5.5, about 4.8 to about 5.4, about 4.8 to about 5.3, about 4.8 to about 5.2, about 4.8 to about 5.1, about 4.8 to about 5.0, about 4.8 to about 4.9, about 4.9 to about 6.5, about 4.9 to about 6.4, about 4.9 to about 6.3, about 4.9 to about 6.2, about 4.9 to about 6.1, about 4.9 to about 6.0, about 4.9 to about 5.9, about 4.9 to about 5.8, about 4.9 to about 5.7, about 4.9 to about 5.6, about 4.9 to about 5.5, about 4.9 to about 5.4, about 4.9 to about 5.3, about 4.9 to about 5.2, about 4.9 to about 5.1, about 4.9 to about 5.0, about 5.0 to about 6.5, about 5.0 to about 6.4, about 5.0 to about 6.3, about 5.0 to about 6.2, about 5.0 to about 6.1, about 5.0 to about 6.0, about 5.0 to about 5.9, about 5.0 to about 5.8, about 5.0 to about 5.7, about 5.0 to about 5.6, about 5.0 to about 5.5, about 5.0 to about 5.4, about 5.0 to about 5.3, about 5.0 to about 5.2, about 5.0 to about 5.1, about 5.1 to about 6.5, about 5.1 to about 6.4, about 5.1 to about 6.3, about 5.1 to about 6.2, about 5.1 to about 6.1, about 5.1 to about 6.0, about 5.1 to about 5.9, about 5.1 to about 5.8, about 5.1 to about 5.7, about 5.1 to about 5.6, about 5.1 to about 5.5, about 5.1 to about 5.4, about 5.1 to about 5.3, about 5.1 to about 5.2, about 5.2 to about 6.5, about 5.2 to about 6.4, about 5.2 to about 6.3, about 5.2 to about 6.2, about 5.2 to about 6.1, about 5.2 to about 6.0, about 5.2 to about 5.9, about 5.2 to about 5.8, about 5.2 to about 5.7, about 5.2 to about 5.6, about 5.2 to about 5.5, about 5.2 to about 5.4, about 5.2 to about 5.3, about 5.3 to about 6.5, about 5.3 to about 6.4, about 5.3 to about 6.3, about 5.3 to about 6.2, about 5.3 to about 6.1, about 5.3 to about 6.0, about 5.3 to about 5.9, about 5.3 to about 5.8, about 5.3 to about 5.7, about 5.3 to about 5.6, about 5.3 to about 5.5, about 5.3 to about 5.4, about 5.4 to about 6.5, about 5.4 to about 6.4, about 5.4 to about 6.3, about 5.4 to about 6.2, about 5.4 to about 6.1, about 5.4 to about 6.0, about 5.4 to about 5.9, about 5.4 to about 5.8, about 5.4 to about 5.7, about 5.4 to about 5.6, about 5.4 to about 5.5, about 5.5 to about 6.5, about 5.5 to about 6.4, about 5.5 to about 6.3, about 5.5 to about 6.2, about 5.5 to about 6.1, about 5.5 to about 6.0, about 5.5 to about 5.9, about 5.5 to about 5.8, about 5.5 to about 5.7, about 5.5 to about 5.6, about 5.6 to about 6.5, about 5.6 to about 6.4, about 5.6 to about 6.3, about 5.6 to about 6.2, about 5.6 to about 6.1, about 5.6 to about 6.0, about 5.6 to about 5.9, about 5.6 to about 5.8, about 5.6 to about 5.7, about 5.7 to about 6.5, about 5.7 to about 6.4, about 5.7 to about 6.3, about 5.7 to about 6.2, about 5.7 to about 6.1, about 5.7 to about 6.0, about 5.7 to about 5.9, about 5.7 to about 5.8, about 5.8 to about 6.5, about 5.8 to about 6.4, about 5.8 to about 6.3, about 5.8 to about 6.2, about 5.8 to about 6.1, about 5.8 to about 6.0, about 5.8 to about 5.9, about 5.9 to about 6.5, about 5.9 to about 6.4, about 5.9 to about 6.3, about 5.9 to about 6.2, about 5.9 to about 6.1, about 5.9 to about 6.0, about 6.0 to about 6.5, about 6.0 to about 6.4, about 6.0 to about 6.3, about 6.0 to about 6.2, about 6.0 to about 6.1, about 6.1 to about 6.5, about 6.1 to about 6.4, about 6.1 to about 6.3, about 6.1 to about 6.2, about 6.2 to about 6.5, about 6.2 to about 6.4, about 6.2 to about 6.3, about 6.3 to about 6.5, about 6.3 to about 6.4, or about 6.4 to about 6.5) is faster (e.g., (e.g., at least 5% faster, at least 10% faster, at least 15% faster, at least 20%, at least 25% faster, at least 30% faster, at least 35% faster, at least 40% faster, at least 45% faster, at least 50% faster, at least 55% faster, at least 60% faster, at least 65% faster, at least 70% faster, at least 75% faster, at least 80% faster, at least 85% faster, at least 90% faster, at least 95% faster, at least 100% faster, at least 120% faster, at least 140% faster, at least 160% faster, at least 180% faster, at least 200% faster, at least 220% faster at least 240% faster at least 260% faster at least 280% faster at least 300% faster at least 320% faster at least 340% faster at least 360% faster at least 380% faster at least 400% faster at least 420% faster at least 440% faster at least 460% faster at least 480% faster, at least 500% faster, at least 1,000% faster, at least 2,000% faster, at least 3,000% faster, at least 4,000% faster, at least 5,000%, at least 6,000% faster, at least 7,000% faster, at least 8,000% faster, at least 9,000% faster, or at least 10,000% faster, or about 5% faster to about 10,000% faster, about 5% faster to about 9,000% faster, about 5% faster to about 8,000% faster, about 5% faster to about 7,000% faster, about 5% faster to about 6,000% faster, about 5% faster to about 5,000% faster, about 5% faster to about 4,000% faster, about 5% faster to about 3,000% faster, about 5% faster to about 2,000% faster, about 5% faster to about 1,000% faster, about 5% faster to about 500% faster, about 5% faster to about 480% faster, about 5% faster to about 460% faster, about 5% faster to about 440% faster, about 5% faster to about 420% faster, about 5% faster to about 400% faster, about 5% faster to about 380% faster, about 5% faster to about 360% faster, about 5% faster to about 340% faster, about 5% faster to about 320% faster, about 5% faster to about 300% faster, about 5% faster to about 280% faster, about 5% faster to about 260% faster, about 5% faster to about 240% faster, about 5% faster to about 220% faster, about 5% faster to about 200% faster, about 5% faster to about 180% faster, about 5% faster to about 160% faster, about 5% faster to about 140% faster, about 5% faster to about 120% faster, about 5% faster to about 100% faster, about 5% faster to about 95% faster, about 5% faster to about 90% faster, about 5% faster to about 85% faster, about 5% faster to about 80% faster, about 5% faster to about 75% faster, about 5% faster to about 70% faster, about 5% faster to about 65% faster, about 5% faster to about 60% faster, about 5% faster to about 55% faster, about 5% faster to about 50% faster, about 5% faster to about 45% faster, about 5% faster to about 40% faster, about 5% faster to about 35% faster, about 5% faster to about 30% faster, about 5% faster to about 25% faster, about 5% faster to about 20% faster, about 5% faster to about 15% faster, about 5% faster to about 10% faster, about 10% faster to about 10,000% faster, about 10% faster to about 9,000% faster, about 10% faster to about 8,000% faster, about 10% faster to about 7,000% faster, about 10% faster to about 6,000% faster, about 10% faster to about 5,000% faster, about 10% faster to about 4,000% faster, about 10% faster to about 3,000% faster, about 10% faster to about 2,000% faster, about 10% faster to about 1,000% faster, about 10% faster to about 500% faster, about 10% faster to about 480% faster, about 10% faster to about 460% faster, about 10% faster to about 440% faster, about 10% faster to about 420% faster, about 10% faster to about 400% faster, about 10% faster to about 380% faster, about 10% faster to about 360% faster, about 10% faster to about 340% faster, about 10% faster to about 320% faster, about 10% faster to about 300% faster, about 10% faster to about 280% faster, about 10% faster to about 260% faster, about 10% faster to about 240% faster, about 10% faster to about 220% faster, about 10% faster to about 200% faster, about 10% faster to about 180% faster, about 10% faster to about 160% faster, about 10% faster to about 140% faster, about 10% faster to about 120% faster, about 10% faster to about 100% faster, about 10% faster to about 95% faster, about 10% faster to about 90% faster, about 10% faster to about 85% faster, about 10% faster to about 80% faster, about 10% faster to about 75% faster, about 10% faster to about 70% faster, about 10% faster to about 65% faster, about 10% faster to about 60% faster, about 10% faster to about 55% faster, about 10% faster to about 50% faster, about 10% faster to about 45% faster, about 10% faster to about 40% faster, about 10% faster to about 35% faster, about 10% faster to about 30% faster, about 10% faster to about 25% faster, about 10% faster to about 20% faster, about 10% faster to about 15% faster, about 15% faster to about 10,000% faster, about 15% faster to about 9,000% faster, about 15% faster to about 8,000% faster, about 15% faster to about 7,000% faster, about 15% faster to about 6,000% faster, about 15% faster to about 5,000% faster, about 15% faster to about 4,000% faster, about 15% faster to about 3,000% faster, about 15% faster to about 2,000% faster, about 15% faster to about 1,000% faster, about 15% faster to about 500% faster, about 15% faster to about 480% faster, about 15% faster to about 460% faster, about 15% faster to about 440% faster, about 15% faster to about 420% faster, about 15% faster to about 400% faster, about 15% faster to about 380% faster, about 15% faster to about 360% faster, about 15% faster to about 340% faster, about 15% faster to about 320% faster, about 15% faster to about 300% faster, about 15% faster to about 280% faster, about 15% faster to about 260% faster, about 15% faster to about 240% faster, about 15% faster to about 220% faster, about 15% faster to about 200% faster, about 15% faster to about 180% faster, about 15% faster to about 160% faster, about 15% faster to about 140% faster, about 15% faster to about 120% faster, about 15% faster to about 100% faster, about 15% faster to about 95% faster, about 15% faster to about 90% faster, about 15% faster to about 85% faster, about 15% faster to about 80% faster, about 15% faster to about 75% faster, about 15% faster to about 70% faster, about 15% faster to about 65% faster, about 15% faster to about 60% faster, about 15% faster to about 55% faster, about 15% faster to about 50% faster, about 15% faster to about 45% faster, about 15% faster to about 40% faster, about 15% faster to about 35% faster, about 15% faster to about 30% faster, about 15% faster to about 25% faster, about 15% faster to about 20% faster, about 20% faster to about 10,000% faster, about 20% faster to about 9,000% faster, about 20% faster to about 8,000% faster, about 20% faster to about 7,000% faster, about 20% faster to about 6,000% faster, about 20% faster to about 5,000% faster, about 20% faster to about 4,000% faster, about 20% faster to about 3,000% faster, about 20% faster to about 2,000% faster, about 20% faster to about 1,000% faster, about 20% faster to about 500% faster, about 20% faster to about 480% faster, about 20% faster to about 460% faster, about 20% faster to about 440% faster, about 20% faster to about 420% faster, about 20% faster to about 400% faster, about 20% faster to about 380% faster, about 20% faster to about 360% faster, about 20% faster to about 340% faster, about 20% faster to about 320% faster, about 20% faster to about 300% faster, about 20% faster to about 280% faster, about 20% faster to about 260% faster, about 20% faster to about 240% faster, about 20% faster to about 220% faster, about 20% faster to about 200% faster, about 20% faster to about 180% faster, about 20% faster to about 160% faster, about 20% faster to about 140% faster, about 20% faster to about 120% faster, about 20% faster to about 100% faster, about 20% faster to about 95% faster, about 20% faster to about 90% faster, about 20% faster to about 85% faster, about 20% faster to about 80% faster, about 20% faster to about 75% faster, about 20% faster to about 70% faster, about 20% faster to about 65% faster, about 20% faster to about 60% faster, about 20% faster to about 55% faster, about 20% faster to about 50% faster, about 20% faster to about 45% faster, about 20% faster to about 40% faster, about 20% faster to about 35% faster, about 20% faster to about 30% faster, about 20% faster to about 25% faster, about 25% faster to about 10,000% faster, about 25% faster to about 9,000% faster, about 25% faster to about 8,000% faster, about 25% faster to about 7,000% faster, about 25% faster to about 6,000% faster, about 25% faster to about 5,000% faster, about 25% faster to about 4,000% faster, about 25% faster to about 3,000% faster, about 25% faster to about 2,000% faster, about 25% faster to about 1,000% faster, about 25% faster to about 500% faster, about 25% faster to about 480% faster, about 25% faster to about 460% faster, about 25% faster to about 440% faster, about 25% faster to about 420% faster, about 25% faster to about 400% faster, about 25% faster to about 380% faster, about 25% faster to about 360% faster, about 25% faster to about 340% faster, about 25% faster to about 320% faster, about 25% faster to about 300% faster, about 25% faster to about 280% faster, about 25% faster to about 260% faster, about 25% faster to about 240% faster, about 25% faster to about 220% faster, about 25% faster to about 200% faster, about 25% faster to about 180% faster, about 25% faster to about 160% faster, about 25% faster to about 140% faster, about 25% faster to about 120% faster, about 25% faster to about 100% faster, about 25% faster to about 95% faster, about 25% faster to about 90% faster, about 25% faster to about 85% faster, about 25% faster to about 80% faster, about 25% faster to about 75% faster, about 25% faster to about 70% faster, about 25% faster to about 65% faster, about 25% faster to about 60% faster, about 25% faster to about 55% faster, about 25% faster to about 50% faster, about 25% faster to about 45% faster, about 25% faster to about 40% faster, about 25% faster to about 35% faster, about 25% faster to about 30% faster, about 30% faster to about 10,000% faster, about 30% faster to about 9,000% faster, about 30% faster to about 8,000% faster, about 30% faster to about 7,000% faster, about 30% faster to about 6,000% faster, about 30% faster to about 5,000% faster, about 30% faster to about 4,000% faster, about 30% faster to about 3,000% faster, about 30% faster to about 2,000% faster, about 30% faster to about 1,000% faster, about 30% faster to about 500% faster, about 30% faster to about 480% faster, about 30% faster to about 460% faster, about 30% faster to about 440% faster, about 30% faster to about 420% faster, about 30% faster to about 400% faster, about 30% faster to about 380% faster, about 30% faster to about 360% faster, about 30% faster to about 340% faster, about 30% faster to about 320% faster, about 30% faster to about 300% faster, about 30% faster to about 280% faster, about 30% faster to about 260% faster, about 30% faster to about 240% faster, about 30% faster to about 220% faster, about 30% faster to about 200% faster, about 30% faster to about 180% faster, about 30% faster to about 160% faster, about 30% faster to about 140% faster, about 30% faster to about 120% faster, about 30% faster to about 100% faster, about 30% faster to about 95% faster, about 30% faster to about 90% faster, about 30% faster to about 85% faster, about 30% faster to about 80% faster, about 30% faster to about 75% faster, about 30% faster to about 70% faster, about 30% faster to about 65% faster, about 30% faster to about 60% faster, about 30% faster to about 55% faster, about 30% faster to about 50% faster, about 30% faster to about 45% faster, about 30% faster to about 40% faster, about 30% faster to about 35% faster, about 35% faster to about 10,000% faster, about 35% faster to about 9,000% faster, about 35% faster to about 8,000% faster, about 35% faster to about 7,000% faster, about 35% faster to about 6,000% faster, about 35% faster to about 5,000% faster, about 35% faster to about 4,000% faster, about 35% faster to about 3,000% faster, about 35% faster to about 2,000% faster, about 35% faster to about 1,000% faster, about 35% faster to about 500% faster, about 35% faster to about 480% faster, about 35% faster to about 460% faster, about 35% faster to about 440% faster, about 35% faster to about 420% faster, about 35% faster to about 400% faster, about 35% faster to about 380% faster, about 35% faster to about 360% faster, about 35% faster to about 340% faster, about 35% faster to about 320% faster, about 35% faster to about 300% faster, about 35% faster to about 280% faster, about 35% faster to about 260% faster, about 35% faster to about 240% faster, about 35% faster to about 220% faster, about 35% faster to about 200% faster, about 35% faster to about 180% faster, about 35% faster to about 160% faster, about 35% faster to about 140% faster, about 35% faster to about 120% faster, about 35% faster to about 100% faster, about 35% faster to about 95% faster, about 35% faster to about 90% faster, about 35% faster to about 85% faster, about 35% faster to about 80% faster, about 35% faster to about 75% faster, about 35% faster to about 70% faster, about 35% faster to about 65% faster, about 35% faster to about 60% faster, about 35% faster to about 55% faster, about 35% faster to about 50% faster, about 35% faster to about 45% faster, about 35% faster to about 40% faster, about 40% faster to about 10,000% faster, about 40% faster to about 9,000% faster, about 40% faster to about 8,000% faster, about 40% faster to about 7,000% faster, about 40% faster to about 6,000% faster, about 40% faster to about 5,000% faster, about 40% faster to about 4,000% faster, about 40% faster to about 3,000% faster, about 40% faster to about 2,000% faster, about 40% faster to about 1,000% faster, about 40% faster to about 500% faster, about 40% faster to about 480% faster, about 40% faster to about 460% faster, about 40% faster to about 440% faster, about 40% faster to about 420% faster, about 40% faster to about 400% faster, about 40% faster to about 380% faster, about 40% faster to about 360% faster, about 40% faster to about 340% faster, about 40% faster to about 320% faster, about 40% faster to about 300% faster, about 40% faster to about 280% faster, about 40% faster to about 260% faster, about 40% faster to about 240% faster, about 40% faster to about 220% faster, about 40% faster to about 200% faster, about 40% faster to about 180% faster, about 40% faster to about 160% faster, about 40% faster to about 140% faster, about 40% faster to about 120% faster, about 40% faster to about 100% faster, about 40% faster to about 95% faster, about 40% faster to about 90% faster, about 40% faster to about 85% faster, about 40% faster to about 80% faster, about 40% faster to about 75% faster, about 40% faster to about 70% faster, about 40% faster to about 65% faster, about 40% faster to about 60% faster, about 40% faster to about 55% faster, about 40% faster to about 50% faster, about 40% faster to about 45% faster, about 45% faster to about 10,000% faster, about 45% faster to about 9,000% faster, about 45% faster to about 8,000% faster, about 45% faster to about 7,000% faster, about 45% faster to about 6,000% faster, about 45% faster to about 5,000% faster, about 45% faster to about 4,000% faster, about 45% faster to about 3,000% faster, about 45% faster to about 2,000% faster, about 45% faster to about 1,000% faster, about 45% faster to about 500% faster, about 45% faster to about 480% faster, about 45% faster to about 460% faster, about 45% faster to about 440% faster, about 45% faster to about 420% faster, about 45% faster to about 400% faster, about 45% faster to about 380% faster, about 45% faster to about 360% faster, about 45% faster to about 340% faster, about 45% faster to about 320% faster, about 45% faster to about 300% faster, about 45% faster to about 280% faster, about 45% faster to about 260% faster, about 45% faster to about 240% faster, about 45% faster to about 220% faster, about 45% faster to about 200% faster, about 45% faster to about 180% faster, about 45% faster to about 160% faster, about 45% faster to about 140% faster, about 45% faster to about 120% faster, about 45% faster to about 100% faster, about 45% faster to about 95% faster, about 45% faster to about 90% faster, about 45% faster to about 85% faster, about 45% faster to about 80% faster, about 45% faster to about 75% faster, about 45% faster to about 70% faster, about 45% faster to about 65% faster, about 45% faster to about 60% faster, about 45% faster to about 55% faster, about 45% faster to about 50% faster, about 50% faster to about 10,000% faster, about 50% faster to about 9,000% faster, about 50% faster to about 8,000% faster, about 50% faster to about 7,000% faster, about 50% faster to about 6,000% faster, about 50% faster to about 5,000% faster, about 50% faster to about 4,000% faster, about 50% faster to about 3,000% faster, about 50% faster to about 2,000% faster, about 50% faster to about 1,000% faster, about 50% faster to about 500% faster, about 50% faster to about 480% faster, about 50% faster to about 460% faster, about 50% faster to about 440% faster, about 50% faster to about 420% faster, about 50% faster to about 400% faster, about 50% faster to about 380% faster, about 50% faster to about 360% faster, about 50% faster to about 340% faster, about 50% faster to about 320% faster, about 50% faster to about 300% faster, about 50% faster to about 280% faster, about 50% faster to about 260% faster, about 50% faster to about 240% faster, about 50% faster to about 220% faster, about 50% faster to about 200% faster, about 50% faster to about 180% faster, about 50% faster to about 160% faster, about 50% faster to about 140% faster, about 50% faster to about 120% faster, about 50% faster to about 100% faster, about 50% faster to about 95% faster, about 50% faster to about 90% faster, about 50% faster to about 85% faster, about 50% faster to about 80% faster, about 50% faster to about 75% faster, about 50% faster to about 70% faster, about 50% faster to about 65% faster, about 50% faster to about 60% faster, about 50% faster to about 55% faster, about 55% faster to about 10,000% faster, about 55% faster to about 9,000% faster, about 55% faster to about 8,000% faster, about 55% faster to about 7,000% faster, about 55% faster to about 6,000% faster, about 55% faster to about 5,000% faster, about 55% faster to about 4,000% faster, about 55% faster to about 3,000% faster, about 55% faster to about 2,000% faster, about 55% faster to about 1,000% faster, about 55% faster to about 500% faster, about 55% faster to about 480% faster, about 55% faster to about 460% faster, about 55% faster to about 440% faster, about 55% faster to about 420% faster, about 55% faster to about 400% faster, about 55% faster to about 380% faster, about 55% faster to about 360% faster, about 55% faster to about 340% faster, about 55% faster to about 320% faster, about 55% faster to about 300% faster, about 55% faster to about 280% faster, about 55% faster to about 260% faster, about 55% faster to about 240% faster, about 55% faster to about 220% faster, about 55% faster to about 200% faster, about 55% faster to about 180% faster, about 55% faster to about 160% faster, about 55% faster to about 140% faster, about 55% faster to about 120% faster, about 55% faster to about 100% faster, about 55% faster to about 95% faster, about 55% faster to about 90% faster, about 55% faster to about 85% faster, about 55% faster to about 80% faster, about 55% faster to about 75% faster, about 55% faster to about 70% faster, about 55% faster to about 65% faster, about 55% faster to about 60% faster, about 60% faster to about 10,000% faster, about 60% faster to about 9,000% faster, about 60% faster to about 8,000% faster, about 60% faster to about 7,000% faster, about 60% faster to about 6,000% faster, about 60% faster to about 5,000% faster, about 60% faster to about 4,000% faster, about 60% faster to about 3,000% faster, about 60% faster to about 2,000% faster, about 60% faster to about 1,000% faster, about 60% faster to about 500% faster, about 60% faster to about 480% faster, about 60% faster to about 460% faster, about 60% faster to about 440% faster, about 60% faster to about 420% faster, about 60% faster to about 400% faster, about 60% faster to about 380% faster, about 60% faster to about 360% faster, about 60% faster to about 340% faster, about 60% faster to about 320% faster, about 60% faster to about 300% faster, about 60% faster to about 280% faster, about 60% faster to about 260% faster, about 60% faster to about 240% faster, about 60% faster to about 220% faster, about 60% faster to about 200% faster, about 60% faster to about 180% faster, about 60% faster to about 160% faster, about 60% faster to about 140% faster, about 60% faster to about 120% faster, about 60% faster to about 100% faster, about 60% faster to about 95% faster, about 60% faster to about 90% faster, about 60% faster to about 85% faster, about 60% faster to about 80% faster, about 60% faster to about 75% faster, about 60% faster to about 70% faster, about 60% faster to about 65% faster, about 65% faster to about 10,000% faster, about 65% faster to about 9,000% faster, about 65% faster to about 8,000% faster, about 65% faster to about 7,000% faster, about 65% faster to about 6,000% faster, about 65% faster to about 5,000% faster, about 65% faster to about 4,000% faster, about 65% faster to about 3,000% faster, about 65% faster to about 2,000% faster, about 65% faster to about 1,000% faster, about 65% faster to about 500% faster, about 65% faster to about 480% faster, about 65% faster to about 460% faster, about 65% faster to about 440% faster, about 65% faster to about 420% faster, about 65% faster to about 400% faster, about 65% faster to about 380% faster, about 65% faster to about 360% faster, about 65% faster to about 340% faster, about 65% faster to about 320% faster, about 65% faster to about 300% faster, about 65% faster to about 280% faster, about 65% faster to about 260% faster, about 65% faster to about 240% faster, about 65% faster to about 220% faster, about 65% faster to about 200% faster, about 65% faster to about 180% faster, about 65% faster to about 160% faster, about 65% faster to about 140% faster, about 65% faster to about 120% faster, about 65% faster to about 100% faster, about 65% faster to about 95% faster, about 65% faster to about 90% faster, about 65% faster to about 85% faster, about 65% faster to about 80% faster, about 65% faster to about 75% faster, about 65% faster to about 70% faster, about 70% faster to about 10,000% faster, about 70% faster to about 9,000% faster, about 70% faster to about 8,000% faster, about 70% faster to about 7,000% faster, about 70% faster to about 6,000% faster, about 70% faster to about 5,000% faster, about 70% faster to about 4,000% faster, about 70% faster to about 3,000% faster, about 70% faster to about 2,000% faster, about 70% faster to about 1,000% faster, about 70% faster to about 500% faster, about 70% faster to about 480% faster, about 70% faster to about 460% faster, about 70% faster to about 440% faster, about 70% faster to about 420% faster, about 70% faster to about 400% faster, about 70% faster to about 380% faster, about 70% faster to about 360% faster, about 70% faster to about 340% faster, about 70% faster to about 320% faster, about 70% faster to about 300% faster, about 70% faster to about 280% faster, about 70% faster to about 260% faster, about 70% faster to about 240% faster, about 70% faster to about 220% faster, about 70% faster to about 200% faster, about 70% faster to about 180% faster, about 70% faster to about 160% faster, about 70% faster to about 140% faster, about 70% faster to about 120% faster, about 70% faster to about 100% faster, about 70% faster to about 95% faster, about 70% faster to about 90% faster, about 70% faster to about 85% faster, about 70% faster to about 80% faster, about 70% faster to about 75% faster, about 75% faster to about 10,000% faster, about 75% faster to about 9,000% faster, about 75% faster to about 8,000% faster, about 75% faster to about 7,000% faster, about 75% faster to about 6,000% faster, about 75% faster to about 5,000% faster, about 75% faster to about 4,000% faster, about 75% faster to about 3,000% faster, about 75% faster to about 2,000% faster, about 75% faster to about 1,000% faster, about 75% faster to about 500% faster, about 75% faster to about 480% faster, about 75% faster to about 460% faster, about 75% faster to about 440% faster, about 75% faster to about 420% faster, about 75% faster to about 400% faster, about 75% faster to about 380% faster, about 75% faster to about 360% faster, about 75% faster to about 340% faster, about 75% faster to about 320% faster, about 75% faster to about 300% faster, about 75% faster to about 280% faster, about 75% faster to about 260% faster, about 75% faster to about 240% faster, about 75% faster to about 220% faster, about 75% faster to about 200% faster, about 75% faster to about 180% faster, about 75% faster to about 160% faster, about 75% faster to about 140% faster, about 75% faster to about 120% faster, about 75% faster to about 100% faster, about 75% faster to about 95% faster, about 75% faster to about 90% faster, about 75% faster to about 85% faster, about 75% faster to about 80% faster, about 80% faster to about 10,000% faster, about 80% faster to about 9,000% faster, about 80% faster to about 8,000% faster, about 80% faster to about 7,000% faster, about 80% faster to about 6,000% faster, about 80% faster to about 5,000% faster, about 80% faster to about 4,000% faster, about 80% faster to about 3,000% faster, about 80% faster to about 2,000% faster, about 80% faster to about 1,000% faster, about 80% faster to about 500% faster, about 80% faster to about 480% faster, about 80% faster to about 460% faster, about 80% faster to about 440% faster, about 80% faster to about 420% faster, about 80% faster to about 400% faster, about 80% faster to about 380% faster, about 80% faster to about 360% faster, about 80% faster to about 340% faster, about 80% faster to about 320% faster, about 80% faster to about 300% faster, about 80% faster to about 280% faster, about 80% faster to about 260% faster, about 80% faster to about 240% faster, about 80% faster to about 220% faster, about 80% faster to about 200% faster, about 80% faster to about 180% faster, about 80% faster to about 160% faster, about 80% faster to about 140% faster, about 80% faster to about 120% faster, about 80% faster to about 100% faster, about 80% faster to about 95% faster, about 80% faster to about 90% faster, about 80% faster to about 85% faster, about 85% faster to about 10,000% faster, about 85% faster to about 9,000% faster, about 85% faster to about 8,000% faster, about 85% faster to about 7,000% faster, about 85% faster to about 6,000% faster, about 85% faster to about 5,000% faster, about 85% faster to about 4,000% faster, about 85% faster to about 3,000% faster, about 85% faster to about 2,000% faster, about 85% faster to about 1,000% faster, about 85% faster to about 500% faster, about 85% faster to about 480% faster, about 85% faster to about 460% faster, about 85% faster to about 440% faster, about 85% faster to about 420% faster, about 85% faster to about 400% faster, about 85% faster to about 380% faster, about 85% faster to about 360% faster, about 85% faster to about 340% faster, about 85% faster to about 320% faster, about 85% faster to about 300% faster, about 85% faster to about 280% faster, about 85% faster to about 260% faster, about 85% faster to about 240% faster, about 85% faster to about 220% faster, about 85% faster to about 200% faster, about 85% faster to about 180% faster, about 85% faster to about 160% faster, about 85% faster to about 140% faster, about 85% faster to about 120% faster, about 85% faster to about 100% faster, about 85% faster to about 95% faster, about 85% faster to about 90% faster, about 90% faster to about 10,000% faster, about 90% faster to about 9,000% faster, about 90% faster to about 8,000% faster, about 90% faster to about 7,000% faster, about 90% faster to about 6,000% faster, about 90% faster to about 5,000% faster, about 90% faster to about 4,000% faster, about 90% faster to about 3,000% faster, about 90% faster to about 2,000% faster, about 90% faster to about 1,000% faster, about 90% faster to about 500% faster, about 90% faster to about 480% faster, about 90% faster to about 460% faster, about 90% faster to about 440% faster, about 90% faster to about 420% faster, about 90% faster to about 400% faster, about 90% faster to about 380% faster, about 90% faster to about 360% faster, about 90% faster to about 340% faster, about 90% faster to about 320% faster, about 90% faster to about 300% faster, about 90% faster to about 280% faster, about 90% faster to about 260% faster, about 90% faster to about 240% faster, about 90% faster to about 220% faster, about 90% faster to about 200% faster, about 90% faster to about 180% faster, about 90% faster to about 160% faster, about 90% faster to about 140% faster, about 90% faster to about 120% faster, about 90% faster to about 100% faster, about 90% faster to about 95% faster, about 95% faster to about 10,000% faster, about 95% faster to about 9,000% faster, about 95% faster to about 8,000% faster, about 95% faster to about 7,000% faster, about 95% faster to about 6,000% faster, about 95% faster to about 5,000% faster, about 95% faster to about 4,000% faster, about 95% faster to about 3,000% faster, about 95% faster to about 2,000% faster, about 95% faster to about 1,000% faster, about 95% faster to about 500% faster, about 95% faster to about 480% faster, about 95% faster to about 460% faster, about 95% faster to about 440% faster, about 95% faster to about 420% faster, about 95% faster to about 400% faster, about 95% faster to about 380% faster, about 95% faster to about 360% faster, about 95% faster to about 340% faster, about 95% faster to about 320% faster, about 95% faster to about 300% faster, about 95% faster to about 280% faster, about 95% faster to about 260% faster, about 95% faster to about 240% faster, about 95% faster to about 220% faster, about 95% faster to about 200% faster, about 95% faster to about 180% faster, about 95% faster to about 160% faster, about 95% faster to about 140% faster, about 95% faster to about 120% faster, about 95% faster to about 100% faster, about 100% faster to about 10,000% faster, about 100% faster to about 9,000% faster, about 100% faster to about 8,000% faster, about 100% faster to about 7,000% faster, about 100% faster to about 6,000% faster, about 100% faster to about 5,000% faster, about 100% faster to about 4,000% faster, about 100% faster to about 3,000% faster, about 100% faster to about 2,000% faster, about 100% faster to about 1,000% faster, about 100% faster to about 500% faster, about 100% faster to about 480% faster, about 100% faster to about 460% faster, about 100% faster to about 440% faster, about 100% faster to about 420% faster, about 100% faster to about 400% faster, about 100% faster to about 380% faster, about 100% faster to about 360% faster, about 100% faster to about 340% faster, about 100% faster to about 320% faster, about 100% faster to about 300% faster, about 100% faster to about 280% faster, about 100% faster to about 260% faster, about 100% faster to about 240% faster, about 100% faster to about 220% faster, about 100% faster to about 200% faster, about 100% faster to about 180% faster, about 100% faster to about 160% faster, about 100% faster to about 140% faster, about 100% faster to about 120% faster, about 120% faster to about 10,000% faster, about 120% faster to about 9,000% faster, about 120% faster to about 8,000% faster, about 120% faster to about 7,000% faster, about 120% faster to about 6,000% faster, about 120% faster to about 5,000% faster, about 120% faster to about 4,000% faster, about 120% faster to about 3,000% faster, about 120% faster to about 2,000% faster, about 120% faster to about 1,000% faster, about 120% faster to about 500% faster, about 120% faster to about 480% faster, about 120% faster to about 460% faster, about 120% faster to about 440% faster, about 120% faster to about 420% faster, about 120% faster to about 400% faster, about 120% faster to about 380% faster, about 120% faster to about 360% faster, about 120% faster to about 340% faster, about 120% faster to about 320% faster, about 120% faster to about 300% faster, about 120% faster to about 280% faster, about 120% faster to about 260% faster, about 120% faster to about 240% faster, about 120% faster to about 220% faster, about 120% faster to about 200% faster, about 120% faster to about 180% faster, about 120% faster to about 160% faster, about 120% faster to about 140% faster, about 140% faster to about 10,000% faster, about 140% faster to about 9,000% faster, about 140% faster to about 8,000% faster, about 140% faster to about 7,000% faster, about 140% faster to about 6,000% faster, about 140% faster to about 5,000% faster, about 140% faster to about 4,000% faster, about 140% faster to about 3,000% faster, about 140% faster to about 2,000% faster, about 140% faster to about 1,000% faster, about 140% faster to about 500% faster, about 140% faster to about 480% faster, about 140% faster to about 460% faster, about 140% faster to about 440% faster, about 140% faster to about 420% faster, about 140% faster to about 400% faster, about 140% faster to about 380% faster, about 140% faster to about 360% faster, about 140% faster to about 340% faster, about 140% faster to about 320% faster, about 140% faster to about 300% faster, about 140% faster to about 280% faster, about 140% faster to about 260% faster, about 140% faster to about 240% faster, about 140% faster to about 220% faster, about 140% faster to about 200% faster, about 140% faster to about 180% faster, about 140% faster to about 160% faster, about 160% faster to about 10,000% faster, about 160% faster to about 9,000% faster, about 160% faster to about 8,000% faster, about 160% faster to about 7,000% faster, about 160% faster to about 6,000% faster, about 160% faster to about 5,000% faster, about 160% faster to about 4,000% faster, about 160% faster to about 3,000% faster, about 160% faster to about 2,000% faster, about 160% faster to about 1,000% faster, about 160% faster to about 500% faster, about 160% faster to about 480% faster, about 160% faster to about 460% faster, about 160% faster to about 440% faster, about 160% faster to about 420% faster, about 160% faster to about 400% faster, about 160% faster to about 380% faster, about 160% faster to about 360% faster, about 160% faster to about 340% faster, about 160% faster to about 320% faster, about 160% faster to about 300% faster, about 160% faster to about 280% faster, about 160% faster to about 260% faster, about 160% faster to about 240% faster, about 160% faster to about 220% faster, about 160% faster to about 200% faster, about 160% faster to about 180% faster, about 180% faster to about 10,000% faster, about 180% faster to about 9,000% faster, about 180% faster to about 8,000% faster, about 180% faster to about 7,000% faster, about 180% faster to about 6,000% faster, about 180% faster to about 5,000% faster, about 180% faster to about 4,000% faster, about 180% faster to about 3,000% faster, about 180% faster to about 2,000% faster, about 180% faster to about 1,000% faster, about 180% faster to about 500% faster, about 180% faster to about 480% faster, about 180% faster to about 460% faster, about 180% faster to about 440% faster, about 180% faster to about 420% faster, about 180% faster to about 400% faster, about 180% faster to about 380% faster, about 180% faster to about 360% faster, about 180% faster to about 340% faster, about 180% faster to about 320% faster, about 180% faster to about 300% faster, about 180% faster to about 280% faster, about 180% faster to about 260% faster, about 180% faster to about 240% faster, about 180% faster to about 220% faster, about 180% faster to about 200% faster, about 200% faster to about 10,000% faster, about 200% faster to about 9,000% faster, about 200% faster to about 8,000% faster, about 200% faster to about 7,000% faster, about 200% faster to about 6,000% faster, about 200% faster to about 5,000% faster, about 200% faster to about 4,000% faster, about 200% faster to about 3,000% faster, about 200% faster to about 2,000% faster, about 200% faster to about 1,000% faster, about 200% faster to about 500% faster, about 200% faster to about 480% faster, about 200% faster to about 460% faster, about 200% faster to about 440% faster, about 200% faster to about 420% faster, about 200% faster to about 400% faster, about 200% faster to about 380% faster, about 200% faster to about 360% faster, about 200% faster to about 340% faster, about 200% faster to about 320% faster, about 200% faster to about 300% faster, about 200% faster to about 280% faster, about 200% faster to about 260% faster, about 200% faster to about 240% faster, about 200% faster to about 220% faster, about 220% faster to about 10,000% faster, about 220% faster to about 9,000% faster, about 220% faster to about 8,000% faster, about 220% faster to about 7,000% faster, about 220% faster to about 6,000% faster, about 220% faster to about 5,000% faster, about 220% faster to about 4,000% faster, about 220% faster to about 3,000% faster, about 220% faster to about 2,000% faster, about 220% faster to about 1,000% faster, about 220% faster to about 500% faster, about 220% faster to about 480% faster, about 220% faster to about 460% faster, about 220% faster to about 440% faster, about 220% faster to about 420% faster, about 220% faster to about 400% faster, about 220% faster to about 380% faster, about 220% faster to about 360% faster, about 220% faster to about 340% faster, about 220% faster to about 320% faster, about 220% faster to about 300% faster, about 220% faster to about 280% faster, about 220% faster to about 260% faster, about 220% faster to about 240% faster, about 240% faster to about 10,000% faster, about 240% faster to about 9,000% faster, about 240% faster to about 8,000% faster, about 240% faster to about 7,000% faster, about 240% faster to about 6,000% faster, about 240% faster to about 5,000% faster, about 240% faster to about 4,000% faster, about 240% faster to about 3,000% faster, about 240% faster to about 2,000% faster, about 240% faster to about 1,000% faster, about 240% faster to about 500% faster, about 240% faster to about 480% faster, about 240% faster to about 460% faster, about 240% faster to about 440% faster, about 240% faster to about 420% faster, about 240% faster to about 400% faster, about 240% faster to about 380% faster, about 240% faster to about 360% faster, about 240% faster to about 340% faster, about 240% faster to about 320% faster, about 240% faster to about 300% faster, about 240% faster to about 280% faster, about 240% faster to about 260% faster, about 260% faster to about 10,000% faster, about 260% faster to about 9,000% faster, about 260% faster to about 8,000% faster, about 260% faster to about 7,000% faster, about 260% faster to about 6,000% faster, about 260% faster to about 5,000% faster, about 260% faster to about 4,000% faster, about 260% faster to about 3,000% faster, about 260% faster to about 2,000% faster, about 260% faster to about 1,000% faster, about 260% faster to about 500% faster, about 260% faster to about 480% faster, about 260% faster to about 460% faster, about 260% faster to about 440% faster, about 260% faster to about 420% faster, about 260% faster to about 400% faster, about 260% faster to about 380% faster, about 260% faster to about 360% faster, about 260% faster to about 340% faster, about 260% faster to about 320% faster, about 260% faster to about 300% faster, about 260% faster to about 280% faster, about 280% faster to about 10,000% faster, about 280% faster to about 9,000% faster, about 280% faster to about 8,000% faster, about 280% faster to about 7,000% faster, about 280% faster to about 6,000% faster, about 280% faster to about 5,000% faster, about 280% faster to about 4,000% faster, about 280% faster to about 3,000% faster, about 280% faster to about 2,000% faster, about 280% faster to about 1,000% faster, about 280% faster to about 500% faster, about 280% faster to about 480% faster, about 280% faster to about 460% faster, about 280% faster to about 440% faster, about 280% faster to about 420% faster, about 280% faster to about 400% faster, about 280% faster to about 380% faster, about 280% faster to about 360% faster, about 280% faster to about 340% faster, about 280% faster to about 320% faster, about 280% faster to about 300% faster, about 300% faster to about 10,000% faster, about 300% faster to about 9,000% faster, about 300% faster to about 8,000% faster, about 300% faster to about 7,000% faster, about 300% faster to about 6,000% faster, about 300% faster to about 5,000% faster, about 300% faster to about 4,000% faster, about 300% faster to about 3,000% faster, about 300% faster to about 2,000% faster, about 300% faster to about 1,000% faster, about 300% faster to about 500% faster, about 300% faster to about 480% faster, about 300% faster to about 460% faster, about 300% faster to about 440% faster, about 300% faster to about 420% faster, about 300% faster to about 400% faster, about 300% faster to about 380% faster, about 300% faster to about 360% faster, about 300% faster to about 340% faster, about 300% faster to about 320% faster, about 320% faster to about 10,000% faster, about 320% faster to about 9,000% faster, about 320% faster to about 8,000% faster, about 320% faster to about 7,000% faster, about 320% faster to about 6,000% faster, about 320% faster to about 5,000% faster, about 320% faster to about 4,000% faster, about 320% faster to about 3,000% faster, about 320% faster to about 2,000% faster, about 320% faster to about 1,000% faster, about 320% faster to about 500% faster, about 320% faster to about 480% faster, about 320% faster to about 460% faster, about 320% faster to about 440% faster, about 320% faster to about 420% faster, about 320% faster to about 400% faster, about 320% faster to about 380% faster, about 320% faster to about 360% faster, about 320% faster to about 340% faster, about 340% faster to about 10,000% faster, about 340% faster to about 9,000% faster, about 340% faster to about 8,000% faster, about 340% faster to about 7,000% faster, about 340% faster to about 6,000% faster, about 340% faster to about 5,000% faster, about 340% faster to about 4,000% faster, about 340% faster to about 3,000% faster, about 340% faster to about 2,000% faster, about 340% faster to about 1,000% faster, about 340% faster to about 500% faster, about 340% faster to about 480% faster, about 340% faster to about 460% faster, about 340% faster to about 440% faster, about 340% faster to about 420% faster, about 340% faster to about 400% faster, about 340% faster to about 380% faster, about 340% faster to about 360% faster, about 360% faster to about 10,000% faster, about 360% faster to about 9,000% faster, about 360% faster to about 8,000% faster, about 360% faster to about 7,000% faster, about 360% faster to about 6,000% faster, about 360% faster to about 5,000% faster, about 360% faster to about 4,000% faster, about 360% faster to about 3,000% faster, about 360% faster to about 2,000% faster, about 360% faster to about 1,000% faster, about 360% faster to about 500% faster, about 360% faster to about 480% faster, about 360% faster to about 460% faster, about 360% faster to about 440% faster, about 360% faster to about 420% faster, about 360% faster to about 400% faster, about 360% faster to about 380% faster, about 380% faster to about 10,000% faster, about 380% faster to about 9,000% faster, about 380% faster to about 8,000% faster, about 380% faster to about 7,000% faster, about 380% faster to about 6,000% faster, about 380% faster to about 5,000% faster, about 380% faster to about 4,000% faster, about 380% faster to about 3,000% faster, about 380% faster to about 2,000% faster, about 380% faster to about 1,000% faster, about 380% faster to about 500% faster, about 380% faster to about 480% faster, about 380% faster to about 460% faster, about 380% faster to about 440% faster, about 380% faster to about 420% faster, about 380% faster to about 400% faster, about 400% faster to about 10,000% faster, about 400% faster to about 9,000% faster, about 400% faster to about 8,000% faster, about 400% faster to about 7,000% faster, about 400% faster to about 6,000% faster, about 400% faster to about 5,000% faster, about 400% faster to about 4,000% faster, about 400% faster to about 3,000% faster, about 400% faster to about 2,000% faster, about 400% faster to about 1,000% faster, about 400% faster to about 500% faster, about 400% faster to about 480% faster, about 400% faster to about 460% faster, about 400% faster to about 440% faster, about 400% faster to about 420% faster, about 420% faster to about 10,000% faster, about 420% faster to about 9,000% faster, about 420% faster to about 8,000% faster, about 420% faster to about 7,000% faster, about 420% faster to about 6,000% faster, about 420% faster to about 5,000% faster, about 420% faster to about 4,000% faster, about 420% faster to about 3,000% faster, about 420% faster to about 2,000% faster, about 420% faster to about 1,000% faster, about 420% faster to about 500% faster, about 420% faster to about 480% faster, about 420% faster to about 460% faster, about 420% faster to about 440% faster, about 440% faster to about 10,000% faster, about 440% faster to about 9,000% faster, about 440% faster to about 8,000% faster, about 440% faster to about 7,000% faster, about 440% faster to about 6,000% faster, about 440% faster to about 5,000% faster, about 440% faster to about 4,000% faster, about 440% faster to about 3,000% faster, about 440% faster to about 2,000% faster, about 440% faster to about 1,000% faster, about 440% faster to about 500% faster, about 440% faster to about 480% faster, about 440% faster to about 460% faster, about 460% faster to about 10,000% faster, about 460% faster to about 9,000% faster, about 460% faster to about 8,000% faster, about 460% faster to about 7,000% faster, about 460% faster to about 6,000% faster, about 460% faster to about 5,000% faster, about 460% faster to about 4,000% faster, about 460% faster to about 3,000% faster, about 460% faster to about 2,000% faster, about 460% faster to about 1,000% faster, about 460% faster to about 500% faster, about 460% faster to about 480% faster, about 480% faster to about 10,000% faster, about 480% faster to about 9,000% faster, about 480% faster to about 8,000% faster, about 480% faster to about 7,000% faster, about 480% faster to about 6,000% faster, about 480% faster to about 5,000% faster, about 480% faster to about 4,000% faster, about 480% faster to about 3,000% faster, about 480% faster to about 2,000% faster, about 480% faster to about 1,000% faster, about 480% faster to about 500% faster, about 500% faster to about 10,000% faster, about 500% faster to about 9,000% faster, about 500% faster to about 8,000% faster, about 500% faster to about 7,000% faster, about 500% faster to about 6,000% faster, about 500% faster to about 5,000% faster, about 500% faster to about 4,000% faster, about 500% faster to about 3,000% faster, about 500% faster to about 2,000% faster, about 500% faster to about 1,000% faster, about 1,000% faster to about 10,000% faster, about 1,000% faster to about 9,000% faster, about 1,000% faster to about 8,000% faster, about 1,000% faster to about 7,000% faster, about 1,000% faster to about 6,000% faster, about 1,000% faster to about 5,000% faster, about 1,000% faster to about 4,000% faster, about 1,000% faster to about 3,000% faster, about 1,000% faster to about 2,000% faster, about 2,000% faster to about 10,000% faster, about 2,000% faster to about 9,000% faster, about 2,000% faster to about 8,000% faster, about 2,000% faster to about 7,000% faster, about 2,000% faster to about 6,000% faster, about 2,000% faster to about 5,000% faster, about 2,000% faster to about 4,000% faster, about 2,000% faster to about 3,000% faster, about 3,000% faster to about 10,000% faster, about 3,000% faster to about 9,000% faster, about 3,000% faster to about 8,000% faster, about 3,000% faster to about 7,000% faster, about 3,000% faster to about 6,000% faster, about 3,000% faster to about 5,000% faster, about 3,000% faster to about 4,000% faster, about 4,000% faster to about 10,000% faster, about 4,000% faster to about 9,000% faster, about 4,000% faster to about 8,000% faster, about 4,000% faster to about 7,000% faster, about 4,000% faster to about 6,000% faster, about 4,000% faster to about 5,000% faster, about 5,000% faster to about 10,000% faster, about 5,000% faster to about 9,000% faster, about 5,000% faster to about 8,000% faster, about 5,000% faster to about 7,000% faster, about 5,000% faster to about 6,000% faster, about 6,000% faster to about 10,000% faster, about 6,000% faster to about 9,000% faster, about 6,000% faster to about 8,000% faster, about 6,000% faster to about 7,000% faster, about 7,000% faster to about 10,000% faster, about 7,000% faster to about 9,000% faster, about 7,000% faster to about 8,000% faster, about 8,000% faster to about 10,000% faster, about 8,000% faster to about 9,000% faster, or about 9,000% faster to about 10,000% faster) than the dissociation rate at a pH of about 7.0 to about 8.0 (e.g., about 7.0 to about 7.9, about 7.0 to about 7.8, about 7.0 to about 7.7, about 7.0 to about 7.6, about 7.0 to about 7.5, about 7.0 to about 7.4, about 7.0 to about 7.3, about 7.0 to about 7.2, about 7.0 to about 7.1, about 7.1 to about 8.0, about 7.1 to about 7.9, about 7.1 to about 7.8, about 7.1 to about 7.7, about 7.1 to about 7.6, about 7.1 to about 7.5, about 7.1 to about 7.4, about 7.1 to about 7.3, about 7.1 to about 7.2, about 7.2 to about 8.0, about 7.2 to about 7.9, about 7.2 to about 7.8, about 7.2 to about 7.7, about 7.2 to about 7.6, about 7.2 to about 7.5, about 7.2 to about 7.4, about 7.2 to about 7.3, about 7.3 to about 8.0, about 7.3 to about 7.9, about 7.3 to about 7.8, about 7.3 to about 7.7, about 7.3 to about 7.6, about 7.3 to about 7.5, about 7.3 to about 7.4, about 7.4 to about 8.0, about 7.4 to about 7.9, about 7.4 to about 7.8, about 7.4 to about 7.7, about 7.4 to about 7.6, about 7.4 to about 7.5, about 7.5 to about 8.0, about 7.5 to about 7.9, about 7.5 to about 7.8, about 7.5 to about 7.7, about 7.5 to about 7.6, about 7.6 to about 8.0, about 7.6 to about 7.9, about 7.6 to about 7.8, about 7.6 to about 7.7, about 7.7 to about 8.0, about 7.7 to about 7.9, about 7.7 to about 7.8, about 7.8 to about 8.0, about 7.8 to about 7.9, or about 7.9 to about 8.0).

[0780] In some embodiments of any of the antigen-binding protein constructs (ABPCs) described herein, the dissociation constant (K_{D}) of the first antigen-binding domain (and optionally the second antigen-binding domain, if present) at a pH of about 4.0 to about 6.5 (e.g., any of the subranges of this range described herein) is greater (e.g., detectably greater) (e.g., at least 5% greater, at least 10% greater, at least 15% greater, at least 20% greater, at least 25% greater, at least 30% greater, at least 35% greater, at least 40% greater, at least 45% greater, at least 50% greater, at least 55% greater, at least 60% greater, at least 65% greater, at least 70% greater, at least 80% greater, at least 85% greater, at least 90% greater, at least 95% greater, at least 100% greater, at least 120% greater, at least 140% greater, at least 160% greater, at least 180% greater, at least 200% greater, at least 220% greater, at least 240% greater, at least 260% greater, at least 280% greater, at least 300% greater, at least 320% greater, at least 340% greater, at least 360% greater, at least 380% greater, at least 400% greater, at least 420% greater, at least 440% greater, at least 460% greater, at least 480% greater, at least 500% greater, at least 1,000% greater, at least 2,000% greater, at least 3,000% greater, at least 4,000% greater, at least 5,000% greater, at least 6,000% greater, at least 7,000% greater, at least 8,000% greater, at least 9,000% greater, or at least 10,000% greater, or about 5% greater to about 10,000% greater, about 5% greater to about 9,000% greater, about 5% greater to about 8,000% greater, about 5% greater to about 7,000% greater, about 5% greater to about 6,000% greater, about 5% greater to about 5,000% greater, about 5% greater to about 4,000% greater, about 5% greater to about 3,000% greater, about 5% greater to about 2,000% greater, about 5% greater to about 1,000% greater, about 5% greater to about 500% greater, about 5% greater to about 480% greater, about 5% greater to about 460% greater, about 5% greater to about 440% greater, about 5% greater to about 420% greater, about 5% greater to about 400% greater, about 5% greater to about 380% greater, about 5% greater to about 360% greater, about 5% greater to about 340% greater, about 5% greater to about 320% greater, about 5% greater to about 300% greater, about 5% greater to about 280% greater, about 5% greater to about 260% greater, about 5% greater to about 240% greater, about 5% greater to about 220% greater, about 5% greater to about 200% greater, about 5% greater to about 180% greater, about 5% greater to about 160% greater, about 5% greater to about 140% greater, about 5% greater to about 120% greater, about 5% greater to about 100% greater, about 5% greater to about 95% greater, about 5% greater to about 90% greater, about 5% greater to about 85% greater, about 5% greater to about 80% greater, about 5% greater to about 75% greater, about 5% greater to about 70% greater, about 5% greater to about 65% greater, about 5% greater to about 60% greater, about 5% greater to about 55% greater, about 5% greater to about 50% greater, about 5% greater to about 45% greater, about 5% greater to about 40% greater, about 5% greater to about 35% greater, about 5% greater to about 30% greater, about 5% greater to about 25% greater, about 5% greater to about 20% greater, about 5% greater to about 15% greater, about 5% greater to about 10% greater, about 10% greater to about 10,000% greater, about 10% greater to about 9,000% greater, about 10% greater to about 8,000% greater, about 10% greater to about 7,000% greater, about 10% greater to about 6,000% greater, about 10% greater to about 5,000% greater, about 10% greater to about 4,000% greater, about 10% greater to about 3,000% greater, about 10% greater to about 2,000% greater, about 10% greater to about 1,000% greater, about 10% greater to about 500% greater, about 10% greater to about 480% greater, about 10% greater to about 460% greater, about 10% greater to about 440% greater, about 10% greater to about 420% greater, about 10% greater to about 400% greater, about 10% greater to about 380% greater, about 10% greater to about 360% greater, about 10% greater to about 340% greater, about 10% greater to about 320% greater, about 10% greater to about 300% greater, about 10% greater to about 280% greater, about 10% greater to about 260% greater, about 10% greater to about 240% greater, about 10% greater to about 220% greater, about 10% greater to about 200% greater, about 10% greater to about 180% greater, about 10% greater to about 160% greater, about 10% greater to about 140% greater, about 10% greater to about 120% greater, about 10% greater to about 100% greater, about 10% greater to about 95% greater, about 10% greater to about 90% greater, about 10% greater to about 85% greater, about 10% greater to about 80% greater, about 10% greater to about 75% greater, about 10% greater to about 70% greater, about 10% greater to about 65% greater, about 10% greater to about 60% greater, about 10% greater to about 55% greater, about 10% greater to about 50% greater, about 10% greater to about 45% greater, about 10% greater to about 40% greater, about 10% greater to about 35% greater, about 10% greater to about 30% greater, about 10% greater to about 25% greater, about 10% greater to about 20% greater, about 10% greater to about 15% greater, about 15% greater to about 10,000% greater, about 15% greater to about 9,000% greater, about 15% greater to about 8,000% greater, about 15% greater to about 7,000% greater, about 15% greater to about 6,000% greater, about 15% greater to about 5,000% greater, about 15% greater to about 4,000% greater, about 15% greater to about 3,000% greater, about 15% greater to about 2,000% greater, about 15% greater to about 1,000% greater, about 15% greater to about 500% greater, about 15% greater to about 480% greater, about 15% greater to about 460% greater, about 15% greater to about 440% greater, about 15% greater to about 420% greater, about 15% greater to about 400% greater, about 15% greater to about 380% greater, about 15% greater to about 360% greater, about 15% greater to about 340% greater, about 15% greater to about 320% greater, about 15% greater to about 300% greater, about 15% greater to about 280% greater, about 15% greater to about 260% greater, about 15% greater to about 240% greater, about 15% greater to about 220% greater, about 15% greater to about 200% greater, about 15% greater to about 180% greater, about 15% greater to about 160% greater, about 15% greater to about 140% greater, about 15% greater to about 120% greater, about 15% greater to about 100% greater, about 15% greater to about 95% greater, about 15% greater to about 90% greater, about 15% greater to about 85% greater, about 15% greater to about 80% greater, about 15% greater to about 75% greater, about 15% greater to about 70% greater, about 15% greater to about 65% greater, about 15% greater to about 60% greater, about 15% greater to about 55% greater, about 15% greater to about 50% greater, about 15% greater to about 45% greater, about 15% greater to about 40% greater, about 15% greater to about 35% greater, about 15% greater to about 30% greater, about 15% greater to about 25% greater, about 15% greater to about 20% greater, about 20% greater to about 10,000% greater, about 20% greater to about 9,000% greater, about 20% greater to about 8,000% greater, about 20% greater to about 7,000% greater, about 20% greater to about 6,000% greater, about 20% greater to about 5,000% greater, about 20% greater to about 4,000% greater, about 20% greater to about 3,000% greater, about 20% greater to about 2,000% greater, about 20% greater to about 1,000% greater, about 20% greater to about 500% greater, about 20% greater to about 480% greater, about 20% greater to about 460% greater, about 20% greater to about 440% greater, about 20% greater to about 420% greater, about 20% greater to about 400% greater, about 20% greater to about 380% greater, about 20% greater to about 360% greater, about 20% greater to about 340% greater, about 20% greater to about 320% greater, about 20% greater to about 300% greater, about 20% greater to about 280% greater, about 20% greater to about 260% greater, about 20% greater to about 240% greater, about 20% greater to about 220% greater, about 20% greater to about 200% greater, about 20% greater to about 180% greater, about 20% greater to about 160% greater, about 20% greater to about 140% greater, about 20% greater to about 120% greater, about 20% greater to about 100% greater, about 20% greater to about 95% greater, about 20% greater to about 90% greater, about 20% greater to about 85% greater, about 20% greater to about 80% greater, about 20% greater to about 75% greater, about 20% greater to about 70% greater, about 20% greater to about 65% greater, about 20% greater to about 60% greater, about 20% greater to about 55% greater, about 20% greater to about 50% greater, about 20% greater to about 45% greater, about 20% greater to about 40% greater, about 20% greater to about 35% greater, about 20% greater to about 30% greater, about 20% greater to about 25% greater, about 25% greater to about 10,000% greater, about 25% greater to about 9,000% greater, about 25% greater to about 8,000% greater, about 25% greater to about 7,000% greater, about 25% greater to about 6,000% greater, about 25% greater to about 5,000% greater, about 25% greater to about 4,000% greater, about 25% greater to about 3,000% greater, about 25% greater to about 2,000% greater, about 25% greater to about 1,000% greater, about 25% greater to about 500% greater, about 25% greater to about 480% greater, about 25% greater to about 460% greater, about 25% greater to about 440% greater, about 25% greater to about 420% greater, about 25% greater to about 400% greater, about 25% greater to about 380% greater, about 25% greater to about 360% greater, about 25% greater to about 340% greater, about 25% greater to about 320% greater, about 25% greater to about 300% greater, about 25% greater to about 280% greater, about 25% greater to about 260% greater, about 25% greater to about 240% greater, about 25% greater to about 220% greater, about 25% greater to about 200% greater, about 25% greater to about 180% greater, about 25% greater to about 160% greater, about 25% greater to about 140% greater, about 25% greater to about 120% greater, about 25% greater to about 100% greater, about 25% greater to about 95% greater, about 25% greater to about 90% greater, about 25% greater to about 85% greater, about 25% greater to about 80% greater, about 25% greater to about 75% greater, about 25% greater to about 70% greater, about 25% greater to about 65% greater, about 25% greater to about 60% greater, about 25% greater to about 55% greater, about 25% greater to about 50% greater, about 25% greater to about 45% greater, about 25% greater to about 40% greater, about 25% greater to about 35% greater, about 25% greater to about 30% greater, about 30% greater to about 10,000% greater, about 30% greater to about 9,000% greater, about 30% greater to about 8,000% greater, about 30% greater to about 7,000% greater, about 30% greater to about 6,000% greater, about 30% greater to about 5,000% greater, about 30% greater to about 4,000% greater, about 30% greater to about 3,000% greater, about 30% greater to about 2,000% greater, about 30% greater to about 1,000% greater, about 30% greater to about 500% greater, about 30% greater to about 480% greater, about 30% greater to about 460% greater, about 30% greater to about 440% greater, about 30% greater to about 420% greater, about 30% greater to about 400% greater, about 30% greater to about 380% greater, about 30% greater to about 360% greater, about 30% greater to about 340% greater, about 30% greater to about 320% greater, about 30% greater to about 300% greater, about 30% greater to about 280% greater, about 30% greater to about 260% greater, about 30% greater to about 240% greater, about 30% greater to about 220% greater, about 30% greater to about 200% greater, about 30% greater to about 180% greater, about 30% greater to about 160% greater, about 30% greater to about 140% greater, about 30% greater to about 120% greater, about 30% greater to about 100% greater, about 30% greater to about 95% greater, about 30% greater to about 90% greater, about 30% greater to about 85% greater, about 30% greater to about 80% greater, about 30% greater to about 75% greater, about 30% greater to about 70% greater, about 30% greater to about 65% greater, about 30% greater to about 60% greater, about 30% greater to about 55% greater, about 30% greater to about 50% greater, about 30% greater to about 45% greater, about 30% greater to about 40% greater, about 30% greater to about 35% greater, about 35% greater to about 10,000% greater, about 35% greater to about 9,000% greater, about 35% greater to about 8,000% greater, about 35% greater to about 7,000% greater, about 35% greater to about 6,000% greater, about 35% greater to about 5,000% greater, about 35% greater to about 4,000% greater, about 35% greater to about 3,000% greater, about 35% greater to about 2,000% greater, about 35% greater to about 1,000% greater, about 35% greater to about 500% greater, about 35% greater to about 480% greater, about 35% greater to about 460% greater, about 35% greater to about 440% greater, about 35% greater to about 420% greater, about 35% greater to about 400% greater, about 35% greater to about 380% greater, about 35% greater to about 360% greater, about 35% greater to about 340% greater, about 35% greater to about 320% greater, about 35% greater to about 300% greater, about 35% greater to about 280% greater, about 35% greater to about 260% greater, about 35% greater to about 240% greater, about 35% greater to about 220% greater, about 35% greater to about 200% greater, about 35% greater to about 180% greater, about 35% greater to about 160% greater, about 35% greater to about 140% greater, about 35% greater to about 120% greater, about 35% greater to about 100% greater, about 35% greater to about 95% greater, about 35% greater to about 90% greater, about 35% greater to about 85% greater, about 35% greater to about 80% greater, about 35% greater to about 75% greater, about 35% greater to about 70% greater, about 35% greater to about 65% greater, about 35% greater to about 60% greater, about 35% greater to about 55% greater, about 35% greater to about 50% greater, about 35% greater to about 45% greater, about 35% greater to about 40% greater, about 40% greater to about 10,000% greater, about 40% greater to about 9,000% greater, about 40% greater to about 8,000% greater, about 40% greater to about 7,000% greater, about 40% greater to about 6,000% greater, about 40% greater to about 5,000% greater, about 40% greater to about 4,000% greater, about 40% greater to about 3,000% greater, about 40% greater to about 2,000% greater, about 40% greater to about 1,000% greater, about 40% greater to about 500% greater, about 40% greater to about 480% greater, about 40% greater to about 460% greater, about 40% greater to about 440% greater, about 40% greater to about 420% greater, about 40% greater to about 400% greater, about 40% greater to about 380% greater, about 40% greater to about 360% greater, about 40% greater to about 340% greater, about 40% greater to about 320% greater, about 40% greater to about 300% greater, about 40% greater to about 280% greater, about 40% greater to about 260% greater, about 40% greater to about 240% greater, about 40% greater to about 220% greater, about 40% greater to about 200% greater, about 40% greater to about 180% greater, about 40% greater to about 160% greater, about 40% greater to about 140% greater, about 40% greater to about 120% greater, about 40% greater to about 100% greater, about 40% greater to about 95% greater, about 40% greater to about 90% greater, about 40% greater to about 85% greater, about 40% greater to about 80% greater, about 40% greater to about 75% greater, about 40% greater to about 70% greater, about 40% greater to about 65% greater, about 40% greater to about 60% greater, about 40% greater to about 55% greater, about 40% greater to about 50% greater, about 40% greater to about 45% greater, about 45% greater to about 10,000% greater, about 45% greater to about 9,000% greater, about 45% greater to about 8,000% greater, about 45% greater to about 7,000% greater, about 45% greater to about 6,000% greater, about 45% greater to about 5,000% greater, about 45% greater to about 4,000% greater, about 45% greater to about 3,000% greater, about 45% greater to about 2,000% greater, about 45% greater to about 1,000% greater, about 45% greater to about 500% greater, about 45% greater to about 480% greater, about 45% greater to about 460% greater, about 45% greater to about 440% greater, about 45% greater to about 420% greater, about 45% greater to about 400% greater, about 45% greater to about 380% greater, about 45% greater to about 360% greater, about 45% greater to about 340% greater, about 45% greater to about 320% greater, about 45% greater to about 300% greater, about 45% greater to about 280% greater, about 45% greater to about 260% greater, about 45% greater to about 240% greater, about 45% greater to about 220% greater, about 45% greater to about 200% greater, about 45% greater to about 180% greater, about 45% greater to about 160% greater, about 45% greater to about 140% greater, about 45% greater to about 120% greater, about 45% greater to about 100% greater, about 45% greater to about 95% greater, about 45% greater to about 90% greater, about 45% greater to about 85% greater, about 45% greater to about 80% greater, about 45% greater to about 75% greater, about 45% greater to about 70% greater, about 45% greater to about 65% greater, about 45% greater to about 60% greater, about 45% greater to about 55% greater, about 45% greater to about 50% greater, about 50% greater to about 10,000% greater, about 50% greater to about 9,000% greater, about 50% greater to about 8,000% greater, about 50% greater to about 7,000% greater, about 50% greater to about 6,000% greater, about 50% greater to about 5,000% greater, about 50% greater to about 4,000% greater, about 50% greater to about 3,000% greater, about 50% greater to about 2,000% greater, about 50% greater to about 1,000% greater, about 50% greater to about 500% greater, about 50% greater to about 480% greater, about 50% greater to about 460% greater, about 50% greater to about 440% greater, about 50% greater to about 420% greater, about 50% greater to about 400% greater, about 50% greater to about 380% greater, about 50% greater to about 360% greater, about 50% greater to about 340% greater, about 50% greater to about 320% greater, about 50% greater to about 300% greater, about 50% greater to about 280% greater, about 50% greater to about 260% greater, about 50% greater to about 240% greater, about 50% greater to about 220% greater, about 50% greater to about 200% greater, about 50% greater to about 180% greater, about 50% greater to about 160% greater, about 50% greater to about 140% greater, about 50% greater to about 120% greater, about 50% greater to about 100% greater, about 50% greater to about 95% greater, about 50% greater to about 90% greater, about 50% greater to about 85% greater, about 50% greater to about 80% greater, about 50% greater to about 75% greater, about 50% greater to about 70% greater, about 50% greater to about 65% greater, about 50% greater to about 60% greater, about 50% greater to about 55% greater, about 55% greater to about 10,000% greater, about 55% greater to about 9,000% greater, about 55% greater to about 8,000% greater, about 55% greater to about 7,000% greater, about 55% greater to about 6,000% greater, about 55% greater to about 5,000% greater, about 55% greater to about 4,000% greater, about 55% greater to about 3,000% greater, about 55% greater to about 2,000% greater, about 55% greater to about 1,000% greater, about 55% greater to about 500% greater, about 55% greater to about 480% greater, about 55% greater to about 460% greater, about 55% greater to about 440% greater, about 55% greater to about 420% greater, about 55% greater to about 400% greater, about 55% greater to about 380% greater, about 55% greater to about 360% greater, about 55% greater to about 340% greater, about 55% greater to about 320% greater, about 55% greater to about 300% greater, about 55% greater to about 280% greater, about 55% greater to about 260% greater, about 55% greater to about 240% greater, about 55% greater to about 220% greater, about 55% greater to about 200% greater, about 55% greater to about 180% greater, about 55% greater to about 160% greater, about 55% greater to about 140% greater, about 55% greater to about 120% greater, about 55% greater to about 100% greater, about 55% greater to about 95% greater, about 55% greater to about 90% greater, about 55% greater to about 85% greater, about 55% greater to about 80% greater, about 55% greater to about 75% greater, about 55% greater to about 70% greater, about 55% greater to about 65% greater, about 55% greater to about 60% greater, about 60% greater to about 10,000% greater, about 60% greater to about 9,000% greater, about 60% greater to about 8,000% greater, about 60% greater to about 7,000% greater, about 60% greater to about 6,000% greater, about 60% greater to about 5,000% greater, about 60% greater to about 4,000% greater, about 60% greater to about 3,000% greater, about 60% greater to about 2,000% greater, about 60% greater to about 1,000% greater, about 60% greater to about 500% greater, about 60% greater to about 480% greater, about 60% greater to about 460% greater, about 60% greater to about 440% greater, about 60% greater to about 420% greater, about 60% greater to about 400% greater, about 60% greater to about 380% greater, about 60% greater to about 360% greater, about 60% greater to about 340% greater, about 60% greater to about 320% greater, about 60% greater to about 300% greater, about 60% greater to about 280% greater, about 60% greater to about 260% greater, about 60% greater to about 240% greater, about 60% greater to about 220% greater, about 60% greater to about 200% greater, about 60% greater to about 180% greater, about 60% greater to about 160% greater, about 60% greater to about 140% greater, about 60% greater to about 120% greater, about 60% greater to about 100% greater, about 60% greater to about 95% greater, about 60% greater to about 90% greater, about 60% greater to about 85% greater, about 60% greater to about 80% greater, about 60% greater to about 75% greater, about 60% greater to about 70% greater, about 60% greater to about 65% greater, about 65% greater to about 10,000% greater, about 65% greater to about 9,000% greater, about 65% greater to about 8,000% greater, about 65% greater to about 7,000% greater, about 65% greater to about 6,000% greater, about 65% greater to about 5,000% greater, about 65% greater to about 4,000% greater, about 65% greater to about 3,000% greater, about 65% greater to about 2,000% greater, about 65% greater to about 1,000% greater, about 65% greater to about 500% greater, about 65% greater to about 480% greater, about 65% greater to about 460% greater, about 65% greater to about 440% greater, about 65% greater to about 420% greater, about 65% greater to about 400% greater, about 65% greater to about 380% greater, about 65% greater to about 360% greater, about 65% greater to about 340% greater, about 65% greater to about 320% greater, about 65% greater to about 300% greater, about 65% greater to about 280% greater, about 65% greater to about 260% greater, about 65% greater to about 240% greater, about 65% greater to about 220% greater, about 65% greater to about 200% greater, about 65% greater to about 180% greater, about 65% greater to about 160% greater, about 65% greater to about 140% greater, about 65% greater to about 120% greater, about 65% greater to about 100% greater, about 65% greater to about 95% greater, about 65% greater to about 90% greater, about 65% greater to about 85% greater, about 65% greater to about 80% greater, about 65% greater to about 75% greater, about 65% greater to about 70% greater, about 70% greater to about 10,000% greater, about 70% greater to about 9,000% greater, about 70% greater to about 8,000% greater, about 70% greater to about 7,000% greater, about 70% greater to about 6,000% greater, about 70% greater to about 5,000% greater, about 70% greater to about 4,000% greater, about 70% greater to about 3,000% greater, about 70% greater to about 2,000% greater, about 70% greater to about 1,000% greater, about 70% greater to about 500% greater, about 70% greater to about 480% greater, about 70% greater to about 460% greater, about 70% greater to about 440% greater, about 70% greater to about 420% greater, about 70% greater to about 400% greater, about 70% greater to about 380% greater, about 70% greater to about 360% greater, about 70% greater to about 340% greater, about 70% greater to about 320% greater, about 70% greater to about 300% greater, about 70% greater to about 280% greater, about 70% greater to about 260% greater, about 70% greater to about 240% greater, about 70% greater to about 220% greater, about 70% greater to about 200% greater, about 70% greater to about 180% greater, about 70% greater to about 160% greater, about 70% greater to about 140% greater, about 70% greater to about 120% greater, about 70% greater to about 100% greater, about 70% greater to about 95% greater, about 70% greater to about 90% greater, about 70% greater to about 85% greater, about 70% greater to about 80% greater, about 70% greater to about 75% greater, about 75% greater to about 10,000% greater, about 75% greater to about 9,000% greater, about 75% greater to about 8,000% greater, about 75% greater to about 7,000% greater, about 75% greater to about 6,000% greater, about 75% greater to about 5,000% greater, about 75% greater to about 4,000% greater, about 75% greater to about 3,000% greater, about 75% greater to about 2,000% greater, about 75% greater to about 1,000% greater, about 75% greater to about 500% greater, about 75% greater to about 480% greater, about 75% greater to about 460% greater, about 75% greater to about 440% greater, about 75% greater to about 420% greater, about 75% greater to about 400% greater, about 75% greater to about 380% greater, about 75% greater to about 360% greater, about 75% greater to about 340% greater, about 75% greater to about 320% greater, about 75% greater to about 300% greater, about 75% greater to about 280% greater, about 75% greater to about 260% greater, about 75% greater to about 240% greater, about 75% greater to about 220% greater, about 75% greater to about 200% greater, about 75% greater to about 180% greater, about 75% greater to about 160% greater, about 75% greater to about 140% greater, about 75% greater to about 120% greater, about 75% greater to about 100% greater, about 75% greater to about 95% greater, about 75% greater to about 90% greater, about 75% greater to about 85% greater, about 75% greater to about 80% greater, about 80% greater to about 10,000% greater, about 80% greater to about 9,000% greater, about 80% greater to about 8,000% greater, about 80% greater to about 7,000% greater, about 80% greater to about 6,000% greater, about 80% greater to about 5,000% greater, about 80% greater to about 4,000% greater, about 80% greater to about 3,000% greater, about 80% greater to about 2,000% greater, about 80% greater to about 1,000% greater, about 80% greater to about 500% greater, about 80% greater to about 480% greater, about 80% greater to about 460% greater, about 80% greater to about 440% greater, about 80% greater to about 420% greater, about 80% greater to about 400% greater, about 80% greater to about 380% greater, about 80% greater to about 360% greater, about 80% greater to about 340% greater, about 80% greater to about 320% greater, about 80% greater to about 300% greater, about 80% greater to about 280% greater, about 80% greater to about 260% greater, about 80% greater to about 240% greater, about 80% greater to about 220% greater, about 80% greater to about 200% greater, about 80% greater to about 180% greater, about 80% greater to about 160% greater, about 80% greater to about 140% greater, about 80% greater to about 120% greater, about 80% greater to about 100% greater, about 80% greater to about 95% greater, about 80% greater to about 90% greater, about 80% greater to about 85% greater, about 85% greater to about 10,000% greater, about 85% greater to about 9,000% greater, about 85% greater to about 8,000% greater, about 85% greater to about 7,000% greater, about 85% greater to about 6,000% greater, about 85% greater to about 5,000% greater, about 85% greater to about 4,000% greater, about 85% greater to about 3,000% greater, about 85% greater to about 2,000% greater, about 85% greater to about 1,000% greater, about 85% greater to about 500% greater, about 85% greater to about 480% greater, about 85% greater to about 460% greater, about 85% greater to about 440% greater, about 85% greater to about 420% greater, about 85% greater to about 400% greater, about 85% greater to about 380% greater, about 85% greater to about 360% greater, about 85% greater to about 340% greater, about 85% greater to about 320% greater, about 85% greater to about 300% greater, about 85% greater to about 280% greater, about 85% greater to about 260% greater, about 85% greater to about 240% greater, about 85% greater to about 220% greater, about 85% greater to about 200% greater, about 85% greater to about 180% greater, about 85% greater to about 160% greater, about 85% greater to about 140% greater, about 85% greater to about 120% greater, about 85% greater to about 100% greater, about 85% greater to about 95% greater, about 85% greater to about 90% greater, about 90% greater to about 10,000% greater, about 90% greater to about 9,000% greater, about 90% greater to about 8,000% greater, about 90% greater to about 7,000% greater, about 90% greater to about 6,000% greater, about 90% greater to about 5,000% greater, about 90% greater to about 4,000% greater, about 90% greater to about 3,000% greater, about 90% greater to about 2,000% greater, about 90% greater to about 1,000% greater, about 90% greater to about 500% greater, about 90% greater to about 480% greater, about 90% greater to about 460% greater, about 90% greater to about 440% greater, about 90% greater to about 420% greater, about 90% greater to about 400% greater, about 90% greater to about 380% greater, about 90% greater to about 360% greater, about 90% greater to about 340% greater, about 90% greater to about 320% greater, about 90% greater to about 300% greater, about 90% greater to about 280% greater, about 90% greater to about 260% greater, about 90% greater to about 240% greater, about 90% greater to about 220% greater, about 90% greater to about 200% greater, about 90% greater to about 180% greater, about 90% greater to about 160% greater, about 90% greater to about 140% greater, about 90% greater to about 120% greater, about 90% greater to about 100% greater, about 90% greater to about 95% greater, about 95% greater to about 10,000% greater, about 95% greater to about 9,000% greater, about 95% greater to about 8,000% greater, about 95% greater to about 7,000% greater, about 95% greater to about 6,000% greater, about 95% greater to about 5,000% greater, about 95% greater to about 4,000% greater, about 95% greater to about 3,000% greater, about 95% greater to about 2,000% greater, about 95% greater to about 1,000% greater, about 95% greater to about 500% greater, about 95% greater to about 480% greater, about 95% greater to about 460% greater, about 95% greater to about 440% greater, about 95% greater to about 420% greater, about 95% greater to about 400% greater, about 95% greater to about 380% greater, about 95% greater to about 360% greater, about 95% greater to about 340% greater, about 95% greater to about 320% greater, about 95% greater to about 300% greater, about 95% greater to about 280% greater, about 95% greater to about 260% greater, about 95% greater to about 240% greater, about 95% greater to about 220% greater, about 95% greater to about 200% greater, about 95% greater to about 180% greater, about 95% greater to about 160% greater, about 95% greater to about 140% greater, about 95% greater to about 120% greater, about 95% greater to about 100% greater, about 100% greater to about 10,000% greater, about 100% greater to about 9,000% greater, about 100% greater to about 8,000% greater, about 100% greater to about 7,000% greater, about 100% greater to about 6,000% greater, about 100% greater to about 5,000% greater, about 100% greater to about 4,000% greater, about 100% greater to about 3,000% greater, about 100% greater to about 2,000% greater, about 100% greater to about 1,000% greater, about 100% greater to about 500% greater, about 100% greater to about 480% greater, about 100% greater to about 460% greater, about 100% greater to about 440% greater, about 100% greater to about 420% greater, about 100% greater to about 400% greater, about 100% greater to about 380% greater, about 100% greater to about 360% greater, about 100% greater to about 340% greater, about 100% greater to about 320% greater, about 100% greater to about 300% greater, about 100% greater to about 280% greater, about 100% greater to about 260% greater, about 100% greater to about 240% greater, about 100% greater to about 220% greater, about 100% greater to about 200% greater, about 100% greater to about 180% greater, about 100% greater to about 160% greater, about 100% greater to about 140% greater, about 100% greater to about 120% greater, about 120% greater to about 10,000% greater, about 120% greater to about 9,000% greater, about 120% greater to about 8,000% greater, about 120% greater to about 7,000% greater, about 120% greater to about 6,000% greater, about 120% greater to about 5,000% greater, about 120% greater to about 4,000% greater, about 120% greater to about 3,000% greater, about 120% greater to about 2,000% greater, about 120% greater to about 1,000% greater, about 120% greater to about 500% greater, about 120% greater to about 480% greater, about 120% greater to about 460% greater, about 120% greater to about 440% greater, about 120% greater to about 420% greater, about 120% greater to about 400% greater, about 120% greater to about 380% greater, about 120% greater to about 360% greater, about 120% greater to about 340% greater, about 120% greater to about 320% greater, about 120% greater to about 300% greater, about 120% greater to about 280% greater, about 120% greater to about 260% greater, about 120% greater to about 240% greater, about 120% greater to about 220% greater, about 120% greater to about 200% greater, about 120% greater to about 180% greater, about 120% greater to about 160% greater, about 120% greater to about 140% greater, about 140% greater to about 10,000% greater, about 140% greater to about 9,000% greater, about 140% greater to about 8,000% greater, about 140% greater to about 7,000% greater, about 140% greater to about 6,000% greater, about 140% greater to about 5,000% greater, about 140% greater to about 4,000% greater, about 140% greater to about 3,000% greater, about 140% greater to about 2,000% greater, about 140% greater to about 1,000% greater, about 140% greater to about 500% greater, about 140% greater to about 480% greater, about 140% greater to about 460% greater, about 140% greater to about 440% greater, about 140% greater to about 420% greater, about 140% greater to about 400% greater, about 140% greater to about 380% greater, about 140% greater to about 360% greater, about 140% greater to about 340% greater, about 140% greater to about 320% greater, about 140% greater to about 300% greater, about 140% greater to about 280% greater, about 140% greater to about 260% greater, about 140% greater to about 240% greater, about 140% greater to about 220% greater, about 140% greater to about 200% greater, about 140% greater to about 180% greater, about 140% greater to about 160% greater, about 160% greater to about 10,000% greater, about 160% greater to about 9,000% greater, about 160% greater to about 8,000% greater, about 160% greater to about 7,000% greater, about 160% greater to about 6,000% greater, about 160% greater to about 5,000% greater, about 160% greater to about 4,000% greater, about 160% greater to about 3,000% greater, about 160% greater to about 2,000% greater, about 160% greater to about 1,000% greater, about 160% greater to about 500% greater, about 160% greater to about 480% greater, about 160% greater to about 460% greater, about 160% greater to about 440% greater, about 160% greater to about 420% greater, about 160% greater to about 400% greater, about 160% greater to about 380% greater, about 160% greater to about 360% greater, about 160% greater to about 340% greater, about 160% greater to about 320% greater, about 160% greater to about 300% greater, about 160% greater to about 280% greater, about 160% greater to about 260% greater, about 160% greater to about 240% greater, about 160% greater to about 220% greater, about 160% greater to about 200% greater, about 160% greater to about 180% greater, about 180% greater to about 10,000% greater, about 180% greater to about 9,000% greater, about 180% greater to about 8,000% greater, about 180% greater to about 7,000% greater, about 180% greater to about 6,000% greater, about 180% greater to about 5,000% greater, about 180% greater to about 4,000% greater, about 180% greater to about 3,000% greater, about 180% greater to about 2,000% greater, about 180% greater to about 1,000% greater, about 180% greater to about 500% greater, about 180% greater to about 480% greater, about 180% greater to about 460% greater, about 180% greater to about 440% greater, about 180% greater to about 420% greater, about 180% greater to about 400% greater, about 180% greater to about 380% greater, about 180% greater to about 360% greater, about 180% greater to about 340% greater, about 180% greater to about 320% greater, about 180% greater to about 300% greater, about 180% greater to about 280% greater, about 180% greater to about 260% greater, about 180% greater to about 240% greater, about 180% greater to about 220% greater, about 180% greater to about 200% greater, about 200% greater to about 10,000% greater, about 200% greater to about 9,000% greater, about 200% greater to about 8,000% greater, about 200% greater to about 7,000% greater, about 200% greater to about 6,000% greater, about 200% greater to about 5,000% greater, about 200% greater to about 4,000% greater, about 200% greater to about 3,000% greater, about 200% greater to about 2,000% greater, about 200% greater to about 1,000% greater, about 200% greater to about 500% greater, about 200% greater to about 480% greater, about 200% greater to about 460% greater, about 200% greater to about 440% greater, about 200% greater to about 420% greater, about 200% greater to about 400% greater, about 200% greater to about 380% greater, about 200% greater to about 360% greater, about 200% greater to about 340% greater, about 200% greater to about 320% greater, about 200% greater to about 300% greater, about 200% greater to about 280% greater, about 200% greater to about 260% greater, about 200% greater to about 240% greater, about 200% greater to about 220% greater, about 220% greater to about 10,000% greater, about 220% greater to about 9,000% greater, about 220% greater to about 8,000% greater, about 220% greater to about 7,000% greater, about 220% greater to about 6,000% greater, about 220% greater to about 5,000% greater, about 220% greater to about 4,000% greater, about 220% greater to about 3,000% greater, about 220% greater to about 2,000% greater, about 220% greater to about 1,000% greater, about 220% greater to about 500% greater, about 220% greater to about 480% greater, about 220% greater to about 460% greater, about 220% greater to about 440% greater, about 220% greater to about 420% greater, about 220% greater to about 400% greater, about 220% greater to about 380% greater, about 220% greater to about 360% greater, about 220% greater to about 340% greater, about 220% greater to about 320% greater, about 220% greater to about 300% greater, about 220% greater to about 280% greater, about 220% greater to about 260% greater, about 220% greater to about 240% greater, about 240% greater to about 10,000% greater, about 240% greater to about 9,000% greater, about 240% greater to about 8,000% greater, about 240% greater to about 7,000% greater, about 240% greater to about 6,000% greater, about 240% greater to about 5,000% greater, about 240% greater to about 4,000% greater, about 240% greater to about 3,000% greater, about 240% greater to about 2,000% greater, about 240% greater to about 1,000% greater, about 240% greater to about 500% greater, about 240% greater to about 480% greater, about 240% greater to about 460% greater, about 240% greater to about 440% greater, about 240% greater to about 420% greater, about 240% greater to about 400% greater, about 240% greater to about 380% greater, about 240% greater to about 360% greater, about 240% greater to about 340% greater, about 240% greater to about 320% greater, about 240% greater to about 300% greater, about 240% greater to about 280% greater, about 240% greater to about 260% greater, about 260% greater to about 10,000% greater, about 260% greater to about 9,000% greater, about 260% greater to about 8,000% greater, about 260% greater to about 7,000% greater, about 260% greater to about 6,000% greater, about 260% greater to about 5,000% greater, about 260% greater to about 4,000% greater, about 260% greater to about 3,000% greater, about 260% greater to about 2,000% greater, about 260% greater to about 1,000% greater, about 260% greater to about 500% greater, about 260% greater to about 480% greater, about 260% greater to about 460% greater, about 260% greater to about 440% greater, about 260% greater to about 420% greater, about 260% greater to about 400% greater, about 260% greater to about 380% greater, about 260% greater to about 360% greater, about 260% greater to about 340% greater, about 260% greater to about 320% greater, about 260% greater to about 300% greater, about 260% greater to about 280% greater, about 280% greater to about 10,000% greater, about 280% greater to about 9,000% greater, about 280% greater to about 8,000% greater, about 280% greater to about 7,000% greater, about 280% greater to about 6,000% greater, about 280% greater to about 5,000% greater, about 280% greater to about 4,000% greater, about 280% greater to about 3,000% greater, about 280% greater to about 2,000% greater, about 280% greater to about 1,000% greater, about 280% greater to about 500% greater, about 280% greater to about 480% greater, about 280% greater to about 460% greater, about 280% greater to about 440% greater, about 280% greater to about 420% greater, about 280% greater to about 400% greater, about 280% greater to about 380% greater, about 280% greater to about 360% greater, about 280% greater to about 340% greater, about 280% greater to about 320% greater, about 280% greater to about 300% greater, about 300% greater to about 10,000% greater, about 300% greater to about 9,000% greater, about 300% greater to about 8,000% greater, about 300% greater to about 7,000% greater, about 300% greater to about 6,000% greater, about 300% greater to about 5,000% greater, about 300% greater to about 4,000% greater, about 300% greater to about 3,000% greater, about 300% greater to about 2,000% greater, about 300% greater to about 1,000% greater, about 300% greater to about 500% greater, about 300% greater to about 480% greater, about 300% greater to about 460% greater, about 300% greater to about 440% greater, about 300% greater to about 420% greater, about 300% greater to about 400% greater, about 300% greater to about 380% greater, about 300% greater to about 360% greater, about 300% greater to about 340% greater, about 300% greater to about 320% greater, about 320% greater to about 10,000% greater, about 320% greater to about 9,000% greater, about 320% greater to about 8,000% greater, about 320% greater to about 7,000% greater, about 320% greater to about 6,000% greater, about 320% greater to about 5,000% greater, about 320% greater to about 4,000% greater, about 320% greater to about 3,000% greater, about 320% greater to about 2,000% greater, about 320% greater to about 1,000% greater, about 320% greater to about 500% greater, about 320% greater to about 480% greater, about 320% greater to about 460% greater, about 320% greater to about 440% greater, about 320% greater to about 420% greater, about 320% greater to about 400% greater, about 320% greater to about 380% greater, about 320% greater to about 360% greater, about 320% greater to about 340% greater, about 340% greater to about 10,000% greater, about 340% greater to about 9,000% greater, about 340% greater to about 8,000% greater, about 340% greater to about 7,000% greater, about 340% greater to about 6,000% greater, about 340% greater to about 5,000% greater, about 340% greater to about 4,000% greater, about 340% greater to about 3,000% greater, about 340% greater to about 2,000% greater, about 340% greater to about 1,000% greater, about 340% greater to about 500% greater, about 340% greater to about 480% greater, about 340% greater to about 460% greater, about 340% greater to about 440% greater, about 340% greater to about 420% greater, about 340% greater to about 400% greater, about 340% greater to about 380% greater, about 340% greater to about 360% greater, about 360% greater to about 10,000% greater, about 360% greater to about 9,000% greater, about 360% greater to about 8,000% greater, about 360% greater to about 7,000% greater, about 360% greater to about 6,000% greater, about 360% greater to about 5,000% greater, about 360% greater to about 4,000% greater, about 360% greater to about 3,000% greater, about 360% greater to about 2,000% greater, about 360% greater to about 1,000% greater, about 360% greater to about 500% greater, about 360% greater to about 480% greater, about 360% greater to about 460% greater, about 360% greater to about 440% greater, about 360% greater to about 420% greater, about 360% greater to about 400% greater, about 360% greater to about 380% greater, about 380% greater to about 10,000% greater, about 380% greater to about 9,000% greater, about 380% greater to about 8,000% greater, about 380% greater to about 7,000% greater, about 380% greater to about 6,000% greater, about 380% greater to about 5,000% greater, about 380% greater to about 4,000% greater, about 380% greater to about 3,000% greater, about 380% greater to about 2,000% greater, about 380% greater to about 1,000% greater, about 380% greater to about 500% greater, about 380% greater to about 480% greater, about 380% greater to about 460% greater, about 380% greater to about 440% greater, about 380% greater to about 420% greater, about 380% greater to about 400% greater, about 400% greater to about 10,000% greater, about 400% greater to about 9,000% greater, about 400% greater to about 8,000% greater, about 400% greater to about 7,000% greater, about 400% greater to about 6,000% greater, about 400% greater to about 5,000% greater, about 400% greater to about 4,000% greater, about 400% greater to about 3,000% greater, about 400% greater to about 2,000% greater, about 400% greater to about 1,000% greater, about 400% greater to about 500% greater, about 400% greater to about 480% greater, about 400% greater to about 460% greater, about 400% greater to about 440% greater, about 400% greater to about 420% greater, about 420% greater to about 10,000% greater, about 420% greater to about 9,000% greater, about 420% greater to about 8,000% greater, about 420% greater to about 7,000% greater, about 420% greater to about 6,000% greater, about 420% greater to about 5,000% greater, about 420% greater to about 4,000% greater, about 420% greater to about 3,000% greater, about 420% greater to about 2,000% greater, about 420% greater to about 1,000% greater, about 420% greater to about 500% greater, about 420% greater to about 480% greater, about 420% greater to about 460% greater, about 420% greater to about 440% greater, about 440% greater to about 10,000% greater, about 440% greater to about 9,000% greater, about 440% greater to about 8,000% greater, about 440% greater to about 7,000% greater, about 440% greater to about 6,000% greater, about 440% greater to about 5,000% greater, about 440% greater to about 4,000% greater, about 440% greater to about 3,000% greater, about 440% greater to about 2,000% greater, about 440% greater to about 1,000% greater, about 440% greater to about 500% greater, about 440% greater to about 480% greater, about 440% greater to about 460% greater, about 460% greater to about 10,000% greater, about 460% greater to about 9,000% greater, about 460% greater to about 8,000% greater, about 460% greater to about 7,000% greater, about 460% greater to about 6,000% greater, about 460% greater to about 5,000% greater, about 460% greater to about 4,000% greater, about 460% greater to about 3,000% greater, about 460% greater to about 2,000% greater, about 460% greater to about 1,000% greater, about 460% greater to about 500% greater, about 460% greater to about 480% greater, about 480% greater to about 10,000% greater, about 480% greater to about 9,000% greater, about 480% greater to about 8,000% greater, about 480% greater to about 7,000% greater, about 480% greater to about 6,000% greater, about 480% greater to about 5,000% greater, about 480% greater to about 4,000% greater, about 480% greater to about 3,000% greater, about 480% greater to about 2,000% greater, about 480% greater to about 1,000% greater, about 480% greater to about 500% greater. about 500% greater to about 10,000% greater, about 500% greater to about 9,000% greater, about 500% greater to about 8,000% greater, about 500% greater to about 7,000% greater, about 500% greater to about 6,000% greater, about 500% greater to about 5,000% greater, about 500% greater to about 4,000% greater, about 500% greater to about 3,000% greater, about 500% greater to about 2,000% greater, about 500% greater to about 1,000% greater, about 1,000% greater to about 10,000% greater, about 1,000% greater to about 9,000% greater, about 1,000% greater to about 8,000% greater, about 1,000% greater to about 7,000% greater, about 1,000% greater to about 6,000% greater, about 1,000% greater to about 5,000% greater, about 1,000% greater to about 4,000% greater, about 1,000% greater to about 3,000% greater, about 1,000% greater to about 2,000% greater, about 2,000% greater to about 10,000% greater, about 2,000% greater to about 9,000% greater, about 2,000% greater to about 8,000% greater, about 2,000% greater to about 7,000% greater, about 2,000% greater to about 6,000% greater, about 2,000% greater to about 5,000% greater, about 2,000% greater to about 4,000% greater, about 2,000% greater to about 3,000% greater, about 3,000% greater to about 10,000% greater, about 3,000% greater to about 9,000% greater, about 3,000% greater to about 8,000% greater, about 3,000% greater to about 7,000% greater, about 3,000% greater to about 6,000% greater, about 3,000% greater to about 5,000% greater, about 3,000% greater to about 4,000% greater, about 4,000% greater to about 10,000% greater, about 4,000% greater to about 9,000% greater, about 4,000% greater to about 8,000% greater, about 4,000% greater to about 7,000% greater, about 4,000% greater to about 6,000% greater, about 4,000% greater to about 5,000% greater, about 5,000% greater to about 10,000% greater, about 5,000% greater to about 9,000% greater, about 5,000% greater to about 8,000% greater, about 5,000% greater to about 7,000% greater, about 5,000% greater to about 6,000% greater, about 6,000% greater to about 10,000% greater, about 6,000% greater to about 9,000% greater, about 6,000% greater to about 8,000% greater, about 6,000% greater to about 7,000% greater, about 7,000% greater to about 10,000% greater, about 7,000% greater to about 9,000% greater, about 7,000% greater to about 8,000% greater, about 8,000% greater to about 10,000% greater, about 8,000% greater to about 9,000% greater, or about 9,000% greater to about 10,000% greater) than the K_{D} at a pH of about 7.0 to about 8.0 (e.g., any of the subranges of this range described herein).

[0781] In some embodiments of any of the antigen-binding protein constructs (ABPCs) described herein, the dissociation rate of the first antigen-binding domain (and optionally the second antigen-binding domain, if present) at a pH of about 4.0 to about 6.5 (e.g., any of the subranges of this range described herein) is faster (e.g., at least 0.2-fold faster, at least 0.3-fold, at least 0.4-fold, at least 0.5-fold, at least 0.6-fold, at least 0.7-fold, at least 0.8-fold, at least 0.9-fold, at least 1.0-fold, at least 1.5-fold, at least 2.0-fold, at least 2.5-fold, at least 3.0 fold, at least 3.5-fold, at least 4.0-fold, at least 4.5-fold, at least 5.0-fold, at least 5.5-fold, at least 6.0-fold, at least 6.5-fold, at least 7.0-fold, at least 7.5-fold, at least 8.0-fold, at least 8.5-fold, at least 9.0-fold, at least 9.5-fold, at least 10.0-fold, at least 10.5-fold, at least 11.0-fold, at least 11.5-fold, at least 12.0-fold, at least 12.5-fold, at least 13.0-fold, at least 13.5-fold, at least 14.0-fold, at least 14.5-fold, at least 15.0-fold, at least 15.5-fold, at least 16.0-fold, at least 16.5-fold, at least 17.0-fold, at least 17.5-fold, at least 18.0-fold, at least 18.5-fold, at least 19.0-fold, at least 19.5-fold, at least 20-fold, at least 25-fold, at least 30-fold, at least 35-fold, at least 40-fold, at least 45-fold, at least 50-fold, at least 55-fold, at least 60-fold, at least 65-fold, at least 70-fold, at least 75-fold, at least 80-fold, at least 85-fold, at least 90-fold, at least 95-fold, or at least 100-fold faster or about 0.2-fold to about 100-fold faster, about 0.2-fold to about 90-fold faster, about 0.2-fold to about 80-fold faster, about 0.2-fold to about 70-fold faster, about 0.2-fold to about 60-fold faster, about 0.2-fold to about 50-fold faster, about 0.2-fold to about 40-fold faster, about 0.2-fold to about 30-fold faster, about 0.2-fold to about 20-fold faster, about 0.2-fold to about 15-fold faster, about 0.2-fold to about 10-fold faster, about 0.2-fold to about 5-fold, about 0.2-fold to about 2-fold faster, about 0.2-fold to about 1-fold faster, about 0.2-fold to about 0.5-fold faster, about 0.5-fold to about 100-fold faster, about 0.5-fold to about 90-fold faster, about 0.5-fold to about 80-fold faster, about 0.5-fold to about 70-fold faster, about 0.5-fold to about 60-fold faster, about 0.5-fold to about 50-fold faster, about 0.5-fold to about 40-fold faster, about 0.5-fold to about 30-fold faster, about 0.5-fold to about 20-fold faster, about 0.5-fold to about 15-fold faster, about 0.5-fold to about 10-fold faster, about 0.5-fold to about 5-fold, about 0.5-fold to about 2-fold faster, about 0.5-fold to about 1-fold faster, about 1-fold to about 100-fold faster, about 1-fold to about 90-fold faster, about 1-fold to about 80-fold faster, about 1-fold to about 70-fold faster, about 1-fold to about 60-fold faster, about 1-fold to about 50-fold faster, about 1-fold to about 40-fold faster, about 1-fold to about 30-fold faster, about 1-fold to about 20-fold faster, about 1-fold to about 15-fold faster, about 1-fold to about 10-fold faster, about 1-fold to about 5-fold, about 1-fold to about 2-fold faster, about 2-fold to about 100-fold faster, about 2-fold to about 90-fold faster, about 2-fold to about 80-fold faster, about 2-fold to about 70-fold faster, about 2-fold to about 60-fold faster, about 2-fold to about 50-fold faster, about 2-fold to about 40-fold faster, about 2-fold to about 30-fold faster, about 2-fold to about 20-fold faster, about 2-fold to about 15-fold faster, about 2-fold to about 10-fold faster, about 2-fold to about 5-fold, about 5-fold to about 100-fold faster, about 5-fold to about 90-fold faster, about 5-fold to about 80-fold faster, about 5-fold to about 70-fold faster, about 5-fold to about 60-fold faster, about 5-fold to about 50-fold faster, about 5-fold to about 40-fold faster, about 5-fold to about 30-fold faster, about 5-fold to about 20-fold faster, about 5-fold to about 15-fold faster, about 5-fold to about 10-fold faster, about 10-fold to about 100-fold faster, about 10-fold to about 90-fold faster, about 10-fold to about 80-fold faster, about 10-fold to about 70-fold faster, about 10-fold to about 60-fold faster, about 10-fold to about 50-fold faster, about 10-fold to about 40-fold faster, about 10-fold to about 30-fold faster, about 10-fold to about 20-fold faster, about 10-fold to about 15-fold faster, about 15-fold to about 100-fold faster, about 15-fold to about 90-fold faster, about 15-fold to about 80-fold faster, about 15-fold to about 70-fold faster, about 15-fold to about 60-fold faster, about 15-fold to about 50-fold faster, about 15-fold to about 40-fold faster, about 15-fold to about 30-fold faster, about 15-fold to about 20-fold faster, about 20-fold to about 100-fold faster, about 20-fold to about 90-fold faster, about 20-fold to about 80-fold faster, about 20-fold to about 70-fold faster, about 20-fold to about 60-fold faster, about 20-fold to about 50-fold faster, about 20-fold to about 40-fold faster, about 20-fold to about 30-fold faster, about 30-fold to about 100-fold faster, about 30-fold to about 90-fold faster, about 30-fold to about 80-fold faster, about 30-fold to about 70-fold faster, about 30-fold to about 60-fold faster, about 30-fold to about 50-fold faster, about 30-fold to about 40-fold faster, about 40-fold to about 100-fold faster, about 40-fold to about 90-fold faster, about 40-fold to about 80-fold faster, about 40-fold to about 70-fold faster, about 40-fold to about 60-fold faster, about 40-fold to about 50-fold faster, about 50-fold to about 100-fold faster, about 50-fold to about 90-fold faster, about 50-fold to about 80-fold faster, about 50-fold to about 70-fold faster, about 50-fold to about 60-fold faster, about 60-fold to about 100-fold faster, about 60-fold to about 90-fold faster, about 60-fold to about 80-fold faster, about 60-fold to about 70-fold faster, about 70-fold to about 100-fold faster, about 70-fold to about 90-fold faster, about 70-fold to about 80-fold faster, about 80-fold to about 100-fold faster, about 80-fold to about 90-fold faster, or about 90-fold to about 100-fold faster) than the dissociation rate at a pH of about 7.0 to about 8.0 (e.g., or any of the subranges of this range described herein).

[0782] In some embodiments of any of the antigen-binding protein constructs (ABPCs) described herein, the dissociation constant (K_{D}) of the first antigen-binding domain (and optionally the second antigen-binding domain, if present) at a pH of about 4.0 to about 6.5 (e.g., any of the subranges of this range described herein) is greater (e.g., detectably greater) (e.g., at least 0.2-fold greater, at least 0.3-fold, at least 0.4-fold, at least 0.5-fold, at least 0.6-fold, at least 0.7-fold, at least 0.8-fold, at least 0.9-fold, at least 1.0-fold, at least 1.5-fold, at least 2.0-fold, at least 2.5-fold, at least 3.0 fold, at least 3.5-fold, at least 4.0-fold, at least 4.5-fold, at least 5.0-fold, at least 5.5-fold, at least 6.0-fold, at least 6.5-fold, at least 7.0-fold, at least 7.5-fold, at least 8.0-fold, at least 8.5-fold, at least 9.0-fold, at least 9.5-fold, at least 10.0-fold, at least 10.5-fold, at least 11.0-fold, at least 11.5-fold, at least 12.0-fold, at least 12.5-fold, at least 13.0-fold, at least 13.5-fold, at least 14.0-fold, at least 14.5-fold, at least 15.0-fold, at least 15.5-fold, at least 16.0-fold, at least 16.5-fold, at least 17.0-fold, at least 17.5-fold, at least 18.0-fold, at least 18.5-fold, at least 19.0-fold, at least 19.5-fold, at least 20-fold greater, at least 25-fold greater, at least 30-fold greater, at least 35-fold greater, at least 40-fold greater, at least 45-fold greater, at least 50-fold greater, at least 55-fold greater, at least 60-fold greater, at least 65-fold greater, at least 70-fold greater, at least 75-fold greater, at least 80-fold greater, at least 85-fold greater, at least 90-fold greater, at least 95-fold greater, or at least 100-fold greater, or about 0.2-fold to about 100-fold greater, about 0.2-fold to about 90-fold greater, about 0.2-fold to about 80-fold greater, about 0.2-fold to about 70-fold greater, about 0.2-fold to about 60-fold greater, about 0.2-fold to about 50-fold greater, about 0.2-fold to about 40-fold greater, about 0.2-fold to about 30-fold greater, about 0.2-fold to about 25-fold greater, about 0.2-fold to about 20-fold greater, about 0.2-fold to about 15-fold greater, about 0.2-fold to about 10-fold greater, about 0.2-fold to about 8-fold greater, about 0.2-fold to about 5-fold greater, about 0.2-fold to about 2-fold greater, about 0.2-fold to about 1-fold greater, about 0.2-fold to about 0.5-fold greater, about 0.5-fold to about 100-fold greater, about 0.5-fold to about 90-fold greater, about 0.5-fold to about 80-fold greater, about 0.5-fold to about 70-fold greater, about 0.5-fold to about 60-fold greater, about 0.5-fold to about 50-fold greater, about 0.5-fold to about 40-fold greater, about 0.5-fold to about 30-fold greater, about 0.5-fold to about 25-fold greater, about 0.5-fold to about 20-fold greater, about 0.5-fold to about 15-fold greater, about 0.5-fold to about 10-fold greater, about 0.5-fold to about 8-fold greater, about 0.5-fold to about 5-fold greater, about 0.5-fold to about 2-fold greater, about 0.5-fold to about 1-fold greater, about 1-fold to about 100-fold greater, about 1-fold to about 90-fold greater, about 1-fold to about 80-fold greater, about 1-fold to about 70-fold greater, about 1-fold to about 60-fold greater, about 1-fold to about 50-fold greater, about 1-fold to about 40-fold greater, about 1-fold to about 30-fold greater, about 1-fold to about 25-fold greater, about 1-fold to about 20-fold greater, about 1-fold to about 15-fold greater, about 1-fold to about 10-fold greater, about 1-fold to about 8-fold greater, about 1-fold to about 5-fold greater, about 1-fold to about 2-fold greater, about 2-fold to about 100-fold greater, about 2-fold to about 90-fold greater, about 2-fold to about 80-fold greater, about 2-fold to about 70-fold greater, about 2-fold to about 60-fold greater, about 2-fold to about 50-fold greater, about 2-fold to about 40-fold greater, about 2-fold to about 30-fold greater, about 2-fold to about 25-fold greater, about 2-fold to about 20-fold greater, about 2-fold to about 15-fold greater, about 2-fold to about 10-fold greater, about 2-fold to about 8-fold greater, about 2-fold to about 5-fold greater, about 5-fold to about 100-fold greater, about 5-fold to about 90-fold greater, about 5-fold to about 80-fold greater, about 5-fold to about 70-fold greater, about 5-fold to about 60-fold greater, about 5-fold to about 50-fold greater, about 5-fold to about 40-fold greater, about 5-fold to about 30-fold greater, about 5-fold to about 25-fold greater, about 5-fold to about 20-fold greater, about 5-fold to about 15-fold greater, about 5-fold to about 10-fold greater, about 5-fold to about 8-fold greater, about 8-fold to about 100-fold greater, about 8-fold to about 90-fold greater, about 8-fold to about 80-fold greater, about 8-fold to about 70-fold greater, about 8-fold to about 60-fold greater, about 8-fold to about 50-fold greater, about 8-fold to about 40-fold greater, about 8-fold to about 30-fold greater, about 8-fold to about 25-fold greater, about 8-fold to about 20-fold greater, about 8-fold to about 15-fold greater, about 8-fold to about 10-fold greater, about 10-fold to about 100-fold greater, about 10-fold to about 90-fold greater, about 10-fold to about 80-fold greater, about 10-fold to about 70-fold greater, about 10-fold to about 60-fold greater, about 10-fold to about 50-fold greater, about 10-fold to about 40-fold greater, about 10-fold to about 30-fold greater, about 10-fold to about 25-fold greater, about 10-fold to about 20-fold greater, about 10-fold to about 15-fold greater, about 15-fold to about 100-fold greater, about 15-fold to about 90-fold greater, about 15-fold to about 80-fold greater, about 15-fold to about 70-fold greater, about 15-fold to about 60-fold greater, about 15-fold to about 50-fold greater, about 15-fold to about 40-fold greater, about 15-fold to about 30-fold greater, about 15-fold to about 25-fold greater, about 15-fold to about 20-fold greater, about 20-fold to about 100-fold greater, about 20-fold to about 90-fold greater, about 20-fold to about 80-fold greater, about 20-fold to about 70-fold greater, about 20-fold to about 60-fold greater, about 20-fold to about 50-fold greater, about 20-fold to about 40-fold greater, about 20-fold to about 30-fold greater, about 20-fold to about 25-fold greater, about 25-fold to about 100-fold greater, about 25-fold to about 90-fold greater, about 25-fold to about 80-fold greater, about 25-fold to about 70-fold greater, about 25-fold to about 60-fold greater, about 25-fold to about 50-fold greater, about 25-fold to about 40-fold greater, about 25-fold to about 30-fold greater, about 30-fold to about 100-fold greater, about 30-fold to about 90-fold greater, about 30-fold to about 80-fold greater, about 30-fold to about 70-fold greater, about 30-fold to about 60-fold greater, about 30-fold to about 50-fold greater, about 30-fold to about 40-fold greater, about 40-fold to about 100-fold greater, about 40-fold to about 90-fold greater, about 40-fold to about 80-fold greater, about 40-fold to about 70-fold greater, about 40-fold to about 60-fold greater, about 40-fold to about 50-fold greater, about 50-fold to about 100-fold greater, about 50-fold to about 90-fold greater, about 50-fold to about 80-fold greater, about 50-fold to about 70-fold greater, about 50-fold to about 60-fold greater, about 60-fold to about 100-fold greater, about 60-fold to about 90-fold greater, about 60-fold to about 80-fold greater, about 60-fold to about 70-fold greater, about 70-fold to about 100-fold greater, about 70-fold to about 90-fold greater, about 70-fold to about 80-fold greater, about 80-fold to about 100-fold greater, about 80-fold to about 90-fold greater, or about 90-fold to about 100-fold greater), than the K_{D} at a pH of about 7.0 to about 8.0 (e.g., any of the subranges of this range described herein).

[0783] In some embodiments of the ABPCs that include a first antigen-binding domain and a second antigen-binding domain, the first and second antigen-binding domains are identical or are at least 80% identical (e.g., at least 82%, at least 84%, at least 86%, at least 88%, at least 90%, at least 91%, at least 92%, at least 93%, at least 94%, at least 95%, at least 96%, at least 97%, at least 98%, or at least 99% identical) in amino acid sequence to each other. In some embodiments, the ABPCs that include a first antigen-binding domain and a second antigen-binding domain, the first antigen-binding domain and the second antigen-binding domain have a sequence that is less than 80% identical (e.g., less than 75% identical, less than 70% identical, less than 65% identical, less than 60% identical, less than 55% identical, less than 50% identical, less than 45% identical, less than 40% identical, less than 35% identical, less than 30% identical, less than 25% identical, less than 20% identical, less than 15% identical, less than 10% identical, or less than 5% identical) to each other. In some embodiments of ABPCs that include a first and a second antigen-binding domain, the first and second antigen-binding domain binds two different epitopes (e.g., two different epitopes on MET or the first antigen-binding domain binding specifically to MET and the second antigen-binding domain binding to an antigen other than MET).

[0784] In some embodiments of any of the ABPCs described herein, the K_{D} of the first antigen-binding domain (and optionally, the second antigen-binding domain if present) at a pH of about 7.0 to about 8.0 (e.g., any of the subranges of this range described herein) is between about 1 pM to about 5 μM (e.g., about 1 pM to about 2 μM, about 1 pM to about 1 μM, about 1 pM to about 500 nM, about 1 pM to about 250 nM, about 1 pM to about 240 nM, about 1 pM to about 230 nM, about 1 pM to about 220 nM, about 1 pM to about 210 nM, about 1 pM to about 200 nM, about 1 pM to about 190 nM, about 1 pM to about 180 nM, about 1 pM to about 170 nM, about 1 pM to about 160 nM, about 1 pM to about 150 nM, about 1 pM to about 140 nM, about 1 pM to about 130 nM, about 1 pM to about 120 nM, about 1 pM to about 110 nM, about 1 pM to about 100 nM, about 1 pM to about 95 nM, about 1 pM to about 90 nM, about 1 pM to about 85 nM, about 1 pM to about 80 nM, about 1 pM to about 75 nM, about 1 pM to about 70 nM, about 1 pM to about 65 nM, about 1 pM to about 60 nM, about 1 pM to about 55 nM, about 1 pM to about 50 nM, about 1 pM to about 45 nM, about 1 pM to about 40 nM, about 1 pM to about 35 nM, about 1 pM to about 30 nM, about 1 pM to about 25 nM, about 1 pM to about 20 nM, about 1 pM to about 15 nM, about 1 pM to about 10 nM, about 1 pM to about 5 nM, about 1 pM to about 2 nM, about 1 pM to about 1 nM, about 1 pM to about 950 pM, about 1 pM to about 900 pM, about 1 pM to about 850 pM, about 1 pM to about 800 pM, about 1 pM to about 750 pM, about 1 pM to about 700 pM, about 1 pM to about 650 pM, about 1 pM to about 600 pM, about 1 pM to about 550 pM, about 1 pM to about 500 pM, about 1 pM to about 450 pM, about 1 pM to about 400 pM, about 1 pM to about 350 pM, about 1 pM to about 300 pM, about 1 pM to about 250 pM, about 1 pM to about 200 pM, about 1 pM to about 150 pM, about 1 pM to about 100 pM, about 1 pM to about 90 pM, about 1 pM to about 80 pM, about 1 pM to about 70 pM, about 1 pM to about 60 pM, about 1 pM to about 50 pM, about 1 pM to about 40 pM, about 1 pM to about 30 pM, about 1 pM to about 20 pM, about 1 pM to about 10 pM, about 1 pM to about 5 pM, about 1 pM to about 4 pM, about 1 pM to about 3 pM, about 1 pM to about 2 pM, about 2 pM to about 5 μM, about 2 pM to about 2 μM, about 2 pM to about 1 μM, about 2 pM to about 500 nM, about 2 pM to about 250 nM, about 2 pM to about 240 nM, about 2 pM to about 230 nM, about 2 pM to about 220 nM, about 2 pM to about 210 nM, about 2 pM to about 200 nM, about 2 pM to about 190 nM, about 2 pM to about 180 nM, about 2 pM to about 170 nM, about 2 pM to about 160 nM, about 2 pM to about 150 nM, about 2 pM to about 140 nM, about 2 pM to about 130 nM, about 2 pM to about 120 nM, about 2 pM to about 110 nM, about 2 pM to about 100 nM, about 2 pM to about 95 nM, about 2 pM to about 90 nM, about 2 pM to about 85 nM, about 2 pM to about 80 nM, about 2 pM to about 75 nM, about 2 pM to about 70 nM, about 2 pM to about 65 nM, about 2 pM to about 60 nM, about 2 pM to about 55 nM, about 2 pM to about 50 nM, about 2 pM to about 45 nM, about 2 pM to about 40 nM, about 2 pM to about 35 nM, about 2 pM to about 30 nM, about 2 pM to about 25 nM, about 2 pM to about 20 nM, about 2 pM to about 15 nM, about 2 pM to about 10 nM, about 2 pM to about 5 nM, about 2 pM to about 2 nM, about 2 pM to about 1 nM, about 2 pM to about 950 pM, about 2 pM to about 900 pM, about 2 pM to about 850 pM, about 2 pM to about 800 pM, about 2 pM to about 750 pM, about 2 pM to about 700 pM, about 2 pM to about 650 pM, about 2 pM to about 600 pM, about 2 pM to about 550 pM, about 2 pM to about 500 pM, about 2 pM to about 450 pM, about 2 pM to about 400 pM, about 2 pM to about 350 pM, about 2 pM to about 300 pM, about 2 pM to about 250 pM, about 2 pM to about 200 pM, about 2 pM to about 150 pM, about 2 pM to about 100 pM, about 2 pM to about 90 pM, about 2 pM to about 80 pM, about 2 pM to about 70 pM, about 2 pM to about 60 pM, about 2 pM to about 50 pM, about 2 pM to about 40 pM, about 2 pM to about 30 pM, about 2 pM to about 20 pM, about 2 pM to about 10 pM, about 2 pM to about 5 pM, about 2 pM to about 4 pM, about 2 pM to about 3 pM, about 5 pM to about 5 μM, about 5 pM to about 2 μM, about 5 pM to about 1 μM, about 5 pM to about 500 nM, about 5 pM to about 250 nM, about 5 pM to about 240 nM, about 5 pM to about 230 nM, about 5 pM to about 220 nM, about 5 pM to about 210 nM, about 5 pM to about 200 nM, about 5 pM to about 190 nM, about 5 pM to about 180 nM, about 5 pM to about 170 nM, about 5 pM to about 160 nM, about 5 pM to about 150 nM, about 5 pM to about 140 nM, about 5 pM to about 130 nM, about 5 pM to about 120 nM, about 5 pM to about 110 nM, about 5 pM to about 100 nM, about 5 pM to about 95 nM, about 5 pM to about 90 nM, about 5 pM to about 85 nM, about 5 pM to about 80 nM, about 5 pM to about 75 nM, about 5 pM to about 70 nM, about 5 pM to about 65 nM, about 5 pM to about 60 nM, about 5 pM to about 55 nM, about 5 pM to about 50 nM, about 5 pM to about 45 nM, about 5 pM to about 40 nM, about 5 pM to about 35 nM, about 5 pM to about 30 nM, about 5 pM to about 25 nM, about 5 pM to about 20 nM, about 5 pM to about 15 nM, about 5 pM to about 10 nM, about 5 pM to about 5 nM, about 5 pM to about 2 nM, about 5 pM to about 1 nM, about 5 pM to about 950 pM, about 5 pM to about 900 pM, about 5 pM to about 850 pM, about 5 pM to about 800 pM, about 5 pM to about 750 pM, about 5 pM to about 700 pM, about 5 pM to about 650 pM, about 5 pM to about 600 pM, about 5 pM to about 550 pM, about 5 pM to about 500 pM, about 5 pM to about 450 pM, about 5 pM to about 400 pM, about 5 pM to about 350 pM, about 5 pM to about 300 pM, about 5 pM to about 250 pM, about 5 pM to about 200 pM, about 5 pM to about 150 pM, about 5 pM to about 100 pM, about 5 pM to about 90 pM, about 5 pM to about 80 pM, about 5 pM to about 70 pM, about 5 pM to about 60 pM, about 5 pM to about 50 pM, about 5 pM to about 40 pM, about 5 pM to about 30 pM, about 5 pM to about 20 pM, about 5 pM to about 10 pM, about 10 pM to about 5 μM, about 10 pM to about 2 μM, about 10 pM to about 1 μM, about 10 pM to about 500 nM, about 10 pM to about 250 nM, about 10 pM to about 240 nM, about 10 pM to about 230 nM, about 10 pM to about 220 nM, about 10 pM to about 210 nM, about 10 pM to about 200 nM, about 10 pM to about 190 nM, about 10 pM to about 180 nM, about 10 pM to about 170 nM, about 10 pM to about 160 nM, about 10 pM to about 150 nM, about 10 pM to about 140 nM, about 10 pM to about 130 nM, about 10 pM to about 120 nM, about 10 pM to about 110 nM, about 10 pM to about 100 nM, about 10 pM to about 95 nM, about 10 pM to about 90 nM, about 10 pM to about 85 nM, about 10 pM to about 80 nM, about 10 pM to about 75 nM, about 10 pM to about 70 nM, about 10 pM to about 65 nM, about 10 pM to about 60 nM, about 10 pM to about 55 nM, about 10 pM to about 50 nM, about 10 pM to about 45 nM, about 10 pM to about 40 nM, about 10 pM to about 35 nM, about 10 pM to about 30 nM, about 10 pM to about 25 nM, about 10 pM to about 20 nM, about 10 pM to about 15 nM, about 10 pM to about 10 nM, about 10 pM to about 5 nM, about 10 pM to about 2 nM, about 10 pM to about 1 nM, about 10 pM to about 950 pM, about 10 pM to about 900 pM, about 10 pM to about 850 pM, about 10 pM to about 800 pM, about 10 pM to about 750 pM, about 10 pM to about 700 pM, about 10 pM to about 650 pM, about 10 pM to about 600 pM, about 10 pM to about 550 pM, about 10 pM to about 500 pM, about 10 pM to about 450 pM, about 10 pM to about 400 pM, about 10 pM to about 350 pM, about 10 pM to about 300 pM, about 10 pM to about 250 pM, about 10 pM to about 200 pM, about 10 pM to about 150 pM, about 10 pM to about 100 pM, about 10 pM to about 90 pM, about 10 pM to about 80 pM, about 10 pM to about 70 pM, about 10 pM to about 60 pM, about 10 pM to about 50 pM, about 10 pM to about 40 pM, about 10 pM to about 30 pM, about 10 pM to about 20 pM, about 15 pM to about 5 μM, about 15 pM to about 2 μM, about 15 pM to about 1 μM, about 15 pM to about 500 nM, about 15 pM to about 250 nM, about 15 pM to about 240 nM, about 15 pM to about 230 nM, about 15 pM to about 220 nM, about 15 pM to about 210 nM, about 15 pM to about 200 nM, about 15 pM to about 190 nM, about 15 pM to about 180 nM, about 15 pM to about 170 nM, about 15 pM to about 160 nM, about 15 pM to about 150 nM, about 15 pM to about 140 nM, about 15 pM to about 130 nM, about 15 pM to about 120 nM, about 15 pM to about 110 nM, about 15 pM to about 100 nM, about 15 pM to about 95 nM, about 15 pM to about 90 nM, about 15 pM to about 85 nM, about 15 pM to about 80 nM, about 15 pM to about 75 nM, about 15 pM to about 70 nM, about 15 pM to about 65 nM, about 15 pM to about 60 nM, about 15 pM to about 55 nM, about 15 pM to about 50 nM, about 15 pM to about 45 nM, about 15 pM to about 40 nM, about 15 pM to about 35 nM, about 15 pM to about 30 nM, about 15 pM to about 25 nM, about 15 pM to about 20 nM, about 15 pM to about 15 nM, about 15 pM to about 10 nM, about 15 pM to about 5 nM, about 15 pM to about 2 nM, about 15 pM to about 1 nM, about 15 pM to about 950 pM, about 15 pM to about 900 pM, about 15 pM to about 850 pM, about 15 pM to about 800 pM, about 15 pM to about 750 pM, about 15 pM to about 700 pM, about 15 pM to about 650 pM, about 15 pM to about 600 pM, about 15 pM to about 550 pM, about 15 pM to about 500 pM, about 15 pM to about 450 pM, about 15 pM to about 400 pM, about 15 pM to about 350 pM, about 15 pM to about 300 pM, about 15 pM to about 250 pM, about 15 pM to about 200 pM, about 15 pM to about 150 pM, about 15 pM to about 100 pM, about 15 pM to about 90 pM, about 15 pM to about 80 pM, about 15 pM to about 70 pM, about 15 pM to about 60 pM, about 15 pM to about 50 pM, about 15 pM to about 40 pM, about 15 pM to about 30 pM, about 15 pM to about 20 pM, about 20 pM to about 5 μM, about 20 pM to about 2 μM, about 20 pM to about 1 μM, about 20 pM to about 500 nM, about 20 pM to about 250 nM, about 20 pM to about 240 nM, about 20 pM to about 230 nM, about 20 pM to about 220 nM, about 20 pM to about 210 nM, about 20 pM to about 200 nM, about 20 pM to about 190 nM, about 20 pM to about 180 nM, about 20 pM to about 170 nM, about 20 pM to about 160 nM, about 20 pM to about 150 nM, about 20 pM to about 140 nM, about 20 pM to about 130 nM, about 20 pM to about 120 nM, about 20 pM to about 110 nM, about 20 pM to about 100 nM, about 20 pM to about 95 nM, about 20 pM to about 90 nM, about 20 pM to about 85 nM, about 20 pM to about 80 nM, about 20 pM to about 75 nM, about 20 pM to about 70 nM, about 20 pM to about 65 nM, about 20 pM to about 60 nM, about 20 pM to about 55 nM, about 20 pM to about 50 nM, about 20 pM to about 45 nM, about 20 pM to about 40 nM, about 20 pM to about 35 nM, about 20 pM to about 30 nM, about 20 pM to about 25 nM, about 20 pM to about 20 nM, about 20 pM to about 15 nM, about 20 pM to about 10 nM, about 20 pM to about 5 nM, about 20 pM to about 2 nM, about 20 pM to about 1 nM, about 20 pM to about 950 pM, about 20 pM to about 900 pM, about 20 pM to about 850 pM, about 20 pM to about 800 pM, about 20 pM to about 750 pM, about 20 pM to about 700 pM, about 20 pM to about 650 pM, about 20 pM to about 600 pM, about 20 pM to about 550 pM, about 20 pM to about 500 pM, about 20 pM to about 450 pM, about 20 pM to about 400 pM, about 20 pM to about 350 pM, about 20 pM to about 300 pM, about 20 pM to about 250 pM, about 20 pM to about 20 pM, about 200 pM to about 150 pM, about 20 pM to about 100 pM, about 20 pM to about 90 pM, about 20 pM to about 80 pM, about 20 pM to about 70 pM, about 20 pM to about 60 pM, about 20 pM to about 50 pM, about 20 pM to about 40 pM, about 20 pM to about 30 pM, about 30 pM to about 5 μM, about 30 pM to about 2 μM, about 30 pM to about 1 μM, about 30 pM to about 500 nM, about 30 pM to about 250 nM, about 30 pM to about 240 nM, about 30 pM to about 230 nM, about 30 pM to about 220 nM, about 30 pM to about 210 nM, about 30 pM to about 200 nM, about 30 pM to about 190 nM, about 30 pM to about 180 nM, about 30 pM to about 170 nM, about 30 pM to about 160 nM, about 30 pM to about 150 nM, about 30 pM to about 140 nM, about 30 pM to about 130 nM, about 30 pM to about 120 nM, about 30 pM to about 110 nM, about 30 pM to about 100 nM, about 30 pM to about 95 nM, about 30 pM to about 90 nM, about 30 pM to about 85 nM, about 30 pM to about 80 nM, about 30 pM to about 75 nM, about 30 pM to about 70 nM, about 30 pM to about 65 nM, about 30 pM to about 60 nM, about 30 pM to about 55 nM, about 30 pM to about 50 nM, about 30 pM to about 45 nM, about 30 pM to about 40 nM, about 30 pM to about 35 nM, about 30 pM to about 30 nM, about 30 pM to about 25 nM, about 30 pM to about 20 nM, about 30 pM to about 15 nM, about 30 pM to about 10 nM, about 30 pM to about 5 nM, about 30 pM to about 2 nM, about 30 pM to about 1 nM, about 30 pM to about 950 pM, about 30 pM to about 900 pM, about 30 pM to about 850 pM, about 30 pM to about 800 pM, about 30 pM to about 750 pM, about 30 pM to about 700 pM, about 30 pM to about 650 pM, about 30 pM to about 600 pM, about 30 pM to about 550 pM, about 30 pM to about 500 pM, about 30 pM to about 450 pM, about 30 pM to about 400 pM, about 30 pM to about 350 pM, about 30 pM to about 300 pM, about 30 pM to about 250 pM, about 30 pM to about 200 pM, about 30 pM to about 150 pM, about 30 pM to about 100 pM, about 30 pM to about 90 pM, about 30 pM to about 80 pM, about 30 pM to about 70 pM, about 30 pM to about 60 pM, about 30 pM to about 50 pM, about 30 pM to about 40 pM, about 40 pM to about 5 μM, about 40 pM to about 2 μM, about 40 pM to about 1 μM, about 40 pM to about 500 nM, about 40 pM to about 250 nM, about 40 pM to about 240 nM, about 40 pM to about 230 nM, about 40 pM to about 220 nM, about 40 pM to about 210 nM, about 40 pM to about 200 nM, about 40 pM to about 190 nM, about 40 pM to about 180 nM, about 40 pM to about 170 nM, about 40 pM to about 160 nM, about 40 pM to about 150 nM, about 40 pM to about 140 nM, about 40 pM to about 130 nM, about 40 pM to about 120 nM, about 40 pM to about 110 nM, about 40 pM to about 100 nM, about 40 pM to about 95 nM, about 40 pM to about 90 nM, about 40 pM to about 85 nM, about 40 pM to about 80 nM, about 40 pM to about 75 nM, about 40 pM to about 70 nM, about 40 pM to about 65 nM, about 40 pM to about 60 nM, about 40 pM to about 55 nM, about 40 pM to about 50 nM, about 40 pM to about 45 nM, about 40 pM to about 40 nM, about 40 pM to about 35 nM, about 40 pM to about 30 nM, about 40 pM to about 25 nM, about 40 pM to about 30 nM, about 40 pM to about 15 nM, about 40 pM to about 10 nM, about 40 pM to about 5 nM, about 40 pM to about 2 nM, about 40 pM to about 1 nM, about 40 pM to about 950 pM, about 40 pM to about 900 pM, about 40 pM to about 850 pM, about 40 pM to about 800 pM, about 40 pM to about 750 pM, about 40 pM to about 700 pM, about 40 pM to about 650 pM, about 40 pM to about 600 pM, about 40 pM to about 550 pM, about 40 pM to about 500 pM, about 40 pM to about 450 pM, about 40 pM to about 400 pM, about 40 pM to about 350 pM, about 40 pM to about 300 pM, about 40 pM to about 250 pM, about 40 pM to about 200 pM, about 40 pM to about 150 pM, about 40 pM to about 100 pM, about 40 pM to about 90 pM, about 40 pM to about 80 pM, about 40 pM to about 70 pM, about 40 pM to about 60 pM, about 40 pM to about 50 pM, about 50 pM to about 5 μM, about 50 pM to about 2 μM, about 50 pM to about 1 μM, about 50 pM to about 500 nM, about 50 pM to about 250 nM, about 50 pM to about 240 nM, about 50 pM to about 230 nM, about 50 pM to about 220 nM, about 50 pM to about 210 nM, about 50 pM to about 200 nM, about 50 pM to about 190 nM, about 50 pM to about 180 nM, about 50 pM to about 170 nM, about 50 pM to about 160 nM, about 50 pM to about 150 nM, about 50 pM to about 140 nM, about 50 pM to about 130 nM, about 50 pM to about 120 nM, about 50 pM to about 110 nM, about 50 pM to about 100 nM, about 50 pM to about 95 nM, about 50 pM to about 90 nM, about 50 pM to about 85 nM, about 50 pM to about 80 nM, about 50 pM to about 75 nM, about 50 pM to about 70 nM, about 50 pM to about 65 nM, about 50 pM to about 60 nM, about 50 pM to about 55 nM, about 50 pM to about 50 nM, about 50 pM to about 45 nM, about 50 pM to about 40 nM, about 50 pM to about 35 nM, about 50 pM to about 30 nM, about 50 pM to about 25 nM, about 50 pM to about 30 nM, about 50 pM to about 15 nM, about 50 pM to about 10 nM, about 50 pM to about 5 nM, about 50 pM to about 2 nM, about 50 pM to about 1 nM, about 50 pM to about 950 pM, about 50 pM to about 900 pM, about 50 pM to about 850 pM, about 50 pM to about 800 pM, about 50 pM to about 750 pM, about 50 pM to about 700 pM, about 50 pM to about 650 pM, about 50 pM to about 600 pM, about 50 pM to about 550 pM, about 50 pM to about 500 pM, about 50 pM to about 450 pM, about 50 pM to about 400 pM, about 50 pM to about 350 pM, about 50 pM to about 300 pM, about 50 pM to about 250 pM, about 50 pM to about 200 pM, about 50 pM to about 150 pM, about 50 pM to about 100 pM, about 50 pM to about 90 pM, about 50 pM to about 80 pM, about 50 pM to about 70 pM, about 50 pM to about 60 pM, about 60 pM to about 5 μM, about 60 pM to about 2 μM, about 60 pM to about 1 μM, about 60 pM to about 500 nM, about 60 pM to about 250 nM, about 60 pM to about 240 nM, about 60 pM to about 230 nM, about 60 pM to about 220 nM, about 60 pM to about 210 nM, about 60 pM to about 200 nM, about 60 pM to about 190 nM, about 60 pM to about 180 nM, about 60 pM to about 170 nM, about 60 pM to about 160 nM, about 60 pM to about 150 nM, about 60 pM to about 140 nM, about 60 pM to about 130 nM, about 60 pM to about 120 nM, about 60 pM to about 110 nM, about 60 pM to about 100 nM, about 60 pM to about 95 nM, about 60 pM to about 90 nM, about 60 pM to about 85 nM, about 60 pM to about 80 nM, about 60 pM to about 75 nM, about 60 pM to about 70 nM, about 60 pM to about 65 nM, about 60 pM to about 60 nM, about 60 pM to about 55 nM, about 60 pM to about 50 nM, about 60 pM to about 45 nM, about 60 pM to about 40 nM, about 60 pM to about 35 nM, about 60 pM to about 30 nM, about 60 pM to about 25 nM, about 60 pM to about 20 nM, about 60 pM to about 15 nM, about 60 pM to about 10 nM, about 60 pM to about 5 nM, about 60 pM to about 2 nM, about 60 pM to about 1 nM, about 60 pM to about 950 pM, about 60 pM to about 900 pM, about 60 pM to about 850 pM, about 60 pM to about 800 pM, about 60 pM to about 750 pM, about 60 pM to about 700 pM, about 60 pM to about 650 pM, about 60 pM to about 600 pM, about 60 pM to about 550 pM, about 60 pM to about 500 pM, about 60 pM to about 450 pM, about 60 pM to about 400 pM, about 60 pM to about 350 pM, about 60 pM to about 300 pM, about 60 pM to about 250 pM, about 60 pM to about 200 pM, about 60 pM to about 150 pM, about 60 pM to about 100 pM, about 60 pM to about 90 pM, about 60 pM to about 80 pM, about 60 pM to about 70 pM, about 70 pM to about 5 μM, about 70 pM to about 2 μM, about 70 pM to about 1 μM, about 70 pM to about 500 nM, about 70 pM to about 250 nM, about 70 pM to about 240 nM, about 70 pM to about 230 nM, about 70 pM to about 220 nM, about 70 pM to about 210 nM, about 70 pM to about 200 nM, about 70 pM to about 190 nM, about 70 pM to about 180 nM, about 70 pM to about 170 nM, about 70 pM to about 160 nM, about 70 pM to about 150 nM, about 70 pM to about 140 nM, about 70 pM to about 130 nM, about 70 pM to about 120 nM, about 70 pM to about 110 nM, about 70 pM to about 100 nM, about 70 pM to about 95 nM, about 70 pM to about 90 nM, about 70 pM to about 85 nM, about 70 pM to about 80 nM, about 70 pM to about 75 nM, about 70 pM to about 70 nM, about 70 pM to about 65 nM, about 70 pM to about 60 nM, about 70 pM to about 55 nM, about 70 pM to about 50 nM, about 70 pM to about 45 nM, about 70 pM to about 40 nM, about 70 pM to about 35 nM, about 70 pM to about 30 nM, about 70 pM to about 25 nM, about 70 pM to about 20 nM, about 70 pM to about 15 nM, about 70 pM to about 10 nM, about 70 pM to about 5 nM, about 70 pM to about 2 nM, about 70 pM to about 1 nM, about 70 pM to about 950 pM, about 70 pM to about 900 pM, about 70 pM to about 850 pM, about 70 pM to about 800 pM, about 70 pM to about 750 pM, about 70 pM to about 700 pM, about 70 pM to about 650 pM, about 70 pM to about 600 pM, about 70 pM to about 550 pM, about 70 pM to about 500 pM, about 70 pM to about 450 pM, about 70 pM to about 400 pM, about 70 pM to about 350 pM, about 70 pM to about 300 pM, about 70 pM to about 250 pM, about 70 pM to about 200 pM, about 70 pM to about 150 pM, about 70 pM to about 100 pM, about 70 pM to about 90 pM, about 70 pM to about 80 pM, about 80 pM to about 5 μM, about 80 pM to about 2 μM, about 80 pM to about 1 μM, about 80 pM to about 500 nM, about 80 pM to about 250 nM, about 80 pM to about 240 nM, about 80 pM to about 230 nM, about 80 pM to about 220 nM, about 80 pM to about 210 nM, about 80 pM to about 200 nM, about 80 pM to about 190 nM, about 80 pM to about 180 nM, about 80 pM to about 170 nM, about 80 pM to about 160 nM, about 80 pM to about 150 nM, about 80 pM to about 140 nM, about 80 pM to about 130 nM, about 80 pM to about 120 nM, about 80 pM to about 110 nM, about 80 pM to about 100 nM, about 80 pM to about 95 nM, about 80 pM to about 90 nM, about 80 pM to about 85 nM, about 80 pM to about 80 nM, about 80 pM to about 75 nM, about 80 pM to about 70 nM, about 80 pM to about 65 nM, about 80 pM to about 60 nM, about 80 pM to about 55 nM, about 80 pM to about 50 nM, about 80 pM to about 45 nM, about 80 pM to about 40 nM, about 80 pM to about 35 nM, about 80 pM to about 30 nM, about 80 pM to about 25 nM, about 80 pM to about 20 nM, about 80 pM to about 15 nM, about 80 pM to about 10 nM, about 80 pM to about 5 nM, about 80 pM to about 2 nM, about 80 pM to about 1 nM, about 80 pM to about 950 pM, about 80 pM to about 900 pM, about 80 pM to about 850 pM, about 80 pM to about 800 pM, about 80 pM to about 750 pM, about 80 pM to about 700 pM, about 80 pM to about 650 pM, about 80 pM to about 600 pM, about 80 pM to about 550 pM, about 80 pM to about 500 pM, about 80 pM to about 450 pM, about 80 pM to about 400 pM, about 80 pM to about 350 pM, about 80 pM to about 300 pM, about 80 pM to about 250 pM, about 80 pM to about 200 pM, about 80 pM to about 150 pM, about 80 pM to about 100 pM, about 80 pM to about 90 pM, about 90 pM to about 5 μM, about 90 pM to about 2 μM, about 90 pM to about 1 μM, about 90 pM to about 500 nM, about 90 pM to about 250 nM, about 90 pM to about 240 nM, about 90 pM to about 230 nM, about 90 pM to about 220 nM, about 90 pM to about 210 nM, about 90 pM to about 200 nM, about 90 pM to about 190 nM, about 90 pM to about 180 nM, about 90 pM to about 170 nM, about 90 pM to about 160 nM, about 90 pM to about 150 nM, about 90 pM to about 140 nM, about 90 pM to about 130 nM, about 90 pM to about 120 nM, about 90 pM to about 110 nM, about 90 pM to about 100 nM, about 90 pM to about 95 nM, about 90 pM to about 90 nM, about 90 pM to about 85 nM, about 90 pM to about 80 nM, about 90 pM to about 75 nM, about 90 pM to about 70 nM, about 90 pM to about 65 nM, about 90 pM to about 60 nM, about 90 pM to about 55 nM, about 90 pM to about 50 nM, about 90 pM to about 45 nM, about 90 pM to about 40 nM, about 90 pM to about 35 nM, about 90 pM to about 30 nM, about 90 pM to about 25 nM, about 90 pM to about 30 nM, about 90 pM to about 15 nM, about 90 pM to about 10 nM, about 90 pM to about 5 nM, about 90 pM to about 2 nM, about 90 pM to about 1 nM, about 90 pM to about 950 pM, about 90 pM to about 900 pM, about 90 pM to about 850 pM, about 90 pM to about 800 pM, about 90 pM to about 750 pM, about 90 pM to about 700 pM, about 90 pM to about 650 pM, about 90 pM to about 600 pM, about 90 pM to about 550 pM, about 90 pM to about 500 pM, about 90 pM to about 450 pM, about 90 pM to about 400 pM, about 90 pM to about 350 pM, about 90 pM to about 300 pM, about 90 pM to about 250 pM, about 90 pM to about 200 pM, about 90 pM to about 150 pM, about 90 pM to about 100 pM, about 100 pM to about 30 nM, about 100 pM to about 25 nM, about 100 pM to about 5 μM, about 100 pM to about 2 μM, about 100 pM to about 1 μM, about 100 pM to about 500 nM, about 100 pM to about 250 nM, about 100 pM to about 240 nM, about 100 pM to about 230 nM, about 100 pM to about 220 nM, about 100 pM to about 210 nM, about 100 pM to about 200 nM, about 100 pM to about 190 nM, about 100 pM to about 180 nM, about 100 pM to about 170 nM, about 100 pM to about 160 nM, about 100 pM to about 150 nM, about 100 pM to about 140 nM, about 100 pM to about 130 nM, about 100 pM to about 120 nM, about 100 pM to about 110 nM, about 100 pM to about 100 nM, about 100 pM to about 95 nM, about 100 pM to about 90 nM, about 100 pM to about 85 nM, about 100 pM to about 80 nM, about 100 pM to about 75 nM, about 100 pM to about 70 nM, about 100 pM to about 65 nM, about 100 pM to about 60 nM, about 100 pM to about 55 nM, about 100 pM to about 50 nM, about 100 pM to about 45 nM, about 100 pM to about 40 nM, about 100 pM to about 35 nM, about 100 pM to about 30 nM, about 100 pM to about 15 nM, about 100 pM to about 10 nM, about 100 pM to about 5 nM, about 100 pM to about 2 nM, about 100 pM to about 1 nM, about 100 pM to about 950 pM, about 100 pM to about 900 pM, about 100 pM to about 850 pM, about 100 pM to about 800 pM, about 100 pM to about 750 pM, about 100 pM to about 700 pM, about 100 pM to about 650 pM, about 100 pM to about 600 pM, about 100 pM to about 550 pM, about 100 pM to about 500 pM, about 100 pM to about 450 pM, about 100 pM to about 400 pM, about 100 pM to about 350 pM, about 100 pM to about 300 pM, about 100 pM to about 250 pM, about 100 pM to about 200 pM, about 100 pM to about 150 pM, about 150 pM to about 5 μM, about 150 pM to about 2 μM, about 150 pM to about 1 μM, about 150 pM to about 500 nM, about 150 pM to about 250 nM, about 150 pM to about 240 nM, about 150 pM to about 230 nM, about 150 pM to about 220 nM, about 150 pM to about 210 nM, about 150 pM to about 200 nM, about 150 pM to about 190 nM, about 150 pM to about 180 nM, about 150 pM to about 170 nM, about 150 pM to about 160 nM, about 150 pM to about 150 nM, about 150 pM to about 140 nM, about 150 pM to about 130 nM, about 150 pM to about 120 nM, about 150 pM to about 110 nM, about 150 pM to about 100 nM, about 150 pM to about 95 nM, about 150 pM to about 90 nM, about 150 pM to about 85 nM, about 150 pM to about 80 nM, about 150 pM to about 75 nM, about 150 pM to about 70 nM, about 150 pM to about 65 nM, about 150 pM to about 60 nM, about 150 pM to about 55 nM, about 150 pM to about 50 nM, about 150 pM to about 45 nM, about 150 pM to about 40 nM, about 150 pM to about 35 nM, about 150 pM to about 30 nM, about 150 pM to about 25 nM, about 150 pM to about 30 nM, about 150 pM to about 15 nM, about 150 pM to about 10 nM, about 150 pM to about 5 nM, about 150 pM to about 2 nM, about 150 pM to about 1 nM, about 150 pM to about 950 pM, about 150 pM to about 900 pM, about 150 pM to about 850 pM, about 150 pM to about 800 pM, about 150 pM to about 750 pM, about 150 pM to about 700 pM, about 150 pM to about 650 pM, about 150 pM to about 600 pM, about 150 pM to about 550 pM, about 150 pM to about 500 pM, about 150 pM to about 450 pM, about 150 pM to about 400 pM, about 150 pM to about 350 pM, about 150 pM to about 300 pM, about 150 pM to about 250 pM, about 150 pM to about 200 pM, about 200 pM to about 5 μM, about 200 pM to about 2 μM, about 200 pM to about 1 μM, about 200 pM to about 500 nM, about 200 pM to about 250 nM, about 200 pM to about 240 nM, about 200 pM to about 230 nM, about 200 pM to about 220 nM, about 200 pM to about 210 nM, about 200 pM to about 200 nM, about 200 pM to about 190 nM, about 200 pM to about 180 nM, about 200 pM to about 170 nM, about 200 pM to about 160 nM, about 200 pM to about 150 nM, about 200 pM to about 140 nM, about 200 pM to about 130 nM, about 200 pM to about 120 nM, about 200 pM to about 110 nM, about 200 pM to about 100 nM, about 200 pM to about 95 nM, about 200 pM to about 90 nM, about 200 pM to about 85 nM, about 200 pM to about 80 nM, about 200 pM to about 75 nM, about 200 pM to about 70 nM, about 200 pM to about 65 nM, about 200 pM to about 60 nM, about 200 pM to about 55 nM, about 200 pM to about 50 nM, about 200 pM to about 45 nM, about 200 pM to about 40 nM, about 200 pM to about 35 nM, about 200 pM to about 30 nM, about 200 pM to about 25 nM, about 200 pM to about 30 nM, about 200 pM to about 15 nM, about 200 pM to about 10 nM, about 200 pM to about 5 nM, about 200 pM to about 2 nM, about 200 pM to about 1 nM, about 200 pM to about 950 pM, about 200 pM to about 900 pM, about 200 pM to about 850 pM, about 200 pM to about 800 pM, about 200 pM to about 750 pM, about 200 pM to about 700 pM, about 200 pM to about 650 pM, about 200 pM to about 600 pM, about 200 pM to about 550 pM, about 200 pM to about 500 pM, about 200 pM to about 450 pM, about 200 pM to about 400 pM, about 200 pM to about 350 pM, about 200 pM to about 300 pM, about 200 pM to about 250 pM, about 300 pM to about 30 nM, about 300 pM to about 25 nM, about 300 pM to about 5 μM, about 300 pM to about 2 μM, about 300 pM to about 1 μM, about 300 pM to about 500 nM, about 300 pM to about 250 nM, about 300 pM to about 240 nM, about 300 pM to about 230 nM, about 300 pM to about 220 nM, about 300 pM to about 210 nM, about 300 pM to about 200 nM, about 300 pM to about 190 nM, about 300 pM to about 180 nM, about 300 pM to about 170 nM, about 300 pM to about 160 nM, about 300 pM to about 150 nM, about 300 pM to about 140 nM, about 300 pM to about 130 nM, about 300 pM to about 120 nM, about 300 pM to about 110 nM, about 300 pM to about 100 nM, about 300 pM to about 95 nM, about 300 pM to about 90 nM, about 300 pM to about 85 nM, about 300 pM to about 80 nM, about 300 pM to about 75 nM, about 300 pM to about 70 nM, about 300 pM to about 65 nM, about 300 pM to about 60 nM, about 300 pM to about 55 nM, about 300 pM to about 50 nM, about 300 pM to about 45 nM, about 300 pM to about 40 nM, about 300 pM to about 35 nM, about 300 pM to about 30 nM, about 300 pM to about 15 nM, about 300 pM to about 10 nM, about 300 pM to about 5 nM, about 300 pM to about 2 nM, about 300 pM to about 1 nM, about 300 pM to about 950 pM, about 300 pM to about 900 pM, about 300 pM to about 850 pM, about 300 pM to about 800 pM, about 300 pM to about 750 pM, about 300 pM to about 700 pM, about 300 pM to about 650 pM, about 300 pM to about 600 pM, about 300 pM to about 550 pM, about 300 pM to about 500 pM, about 300 pM to about 450 pM, about 300 pM to about 400 pM, about 300 pM to about 350 pM, about 400 pM to about 5 μM, about 400 pM to about 2 μM, about 400 pM to about 1 μM, about 400 pM to about 500 nM, about 400 pM to about 250 nM, about 400 pM to about 240 nM, about 400 pM to about 230 nM, about 400 pM to about 220 nM, about 400 pM to about 210 nM, about 400 pM to about 200 nM, about 400 pM to about 190 nM, about 400 pM to about 180 nM, about 400 pM to about 170 nM, about 400 pM to about 160 nM, about 400 pM to about 150 nM, about 400 pM to about 140 nM, about 400 pM to about 130 nM, about 400 pM to about 120 nM, about 400 pM to about 110 nM, about 400 pM to about 100 nM, about 400 pM to about 95 nM, about 400 pM to about 90 nM, about 400 pM to about 85 nM, about 400 pM to about 80 nM, about 400 pM to about 75 nM, about 400 pM to about 70 nM, about 400 pM to about 65 nM, about 400 pM to about 60 nM, about 400 pM to about 55 nM, about 400 pM to about 50 nM, about 400 pM to about 45 nM, about 400 pM to about 40 nM, about 400 pM to about 35 nM, about 400 pM to about 30 nM, about 400 pM to about 25 nM, about 400 pM to about 20 nM, about 400 pM to about 15 nM, about 400 pM to about 10 nM, about 400 pM to about 5 nM, about 400 pM to about 2 nM, about 400 pM to about 1 nM, about 400 pM to about 950 pM, about 400 pM to about 900 pM, about 400 pM to about 850 pM, about 400 pM to about 800 pM, about 400 pM to about 750 pM, about 400 pM to about 700 pM, about 400 pM to about 650 pM, about 400 pM to about 600 pM, about 400 pM to about 550 pM, about 400 pM to about 500 pM, about 500 pM to about 5 μM, about 500 pM to about 2 μM, about 500 pM to about 1 μM, about 500 pM to about 500 nM, about 500 pM to about 250 nM, about 500 pM to about 240 nM, about 500 pM to about 230 nM, about 500 pM to about 220 nM, about 500 pM to about 210 nM, about 500 pM to about 200 nM, about 500 pM to about 190 nM, about 500 pM to about 180 nM, about 500 pM to about 170 nM, about 500 pM to about 160 nM, about 500 pM to about 150 nM, about 500 pM to about 140 nM, about 500 pM to about 130 nM, about 500 pM to about 120 nM, about 500 pM to about 110 nM, about 500 pM to about 100 nM, about 500 pM to about 95 nM, about 500 pM to about 90 nM, about 500 pM to about 85 nM, about 500 pM to about 80 nM, about 500 pM to about 75 nM, about 500 pM to about 70 nM, about 500 pM to about 65 nM, about 500 pM to about 60 nM, about 500 pM to about 55 nM, about 500 pM to about 50 nM, about 500 pM to about 45 nM, about 500 pM to about 40 nM, about 500 pM to about 35 nM, about 500 pM to about 30 nM, about 500 pM to about 25 nM, about 500 pM to about 20 nM, about 500 pM to about 15 nM, about 500 pM to about 10 nM, about 500 pM to about 5 nM, about 500 pM to about 2 nM, about 500 pM to about 1 nM, about 500 pM to about 950 pM, about 500 pM to about 900 pM, about 500 pM to about 850 pM, about 500 pM to about 800 pM, about 500 pM to about 750 pM, about 500 pM to about 700 pM, about 500 pM to about 650 pM, about 500 pM to about 600 pM, about 500 pM to about 550 pM, about 600 pM to about 5 μM, about 600 pM to about 2 μM, about 600 pM to about 1 μM, about 600 pM to about 500 nM, about 600 pM to about 250 nM, about 600 pM to about 240 nM, about 600 pM to about 230 nM, about 600 pM to about 220 nM, about 600 pM to about 210 nM, about 600 pM to about 200 nM, about 600 pM to about 190 nM, about 600 pM to about 180 nM, about 600 pM to about 170 nM, about 600 pM to about 160 nM, about 600 pM to about 150 nM, about 600 pM to about 140 nM, about 600 pM to about 130 nM, about 600 pM to about 120 nM, about 600 pM to about 110 nM, about 600 pM to about 100 nM, about 600 pM to about 95 nM, about 600 pM to about 90 nM, about 600 pM to about 85 nM, about 600 pM to about 80 nM, about 600 pM to about 75 nM, about 600 pM to about 70 nM, about 600 pM to about 65 nM, about 600 pM to about 60 nM, about 600 pM to about 55 nM, about 600 pM to about 50 nM, about 600 pM to about 45 nM, about 600 pM to about 40 nM, about 600 pM to about 35 nM, about 600 pM to about 30 nM, about 600 pM to about 25 nM, about 600 pM to about 20 nM, about 600 pM to about 15 nM, about 600 pM to about 10 nM, about 600 pM to about 5 nM, about 600 pM to about 2 nM, about 600 pM to about 1 nM, about 600 pM to about 950 pM, about 600 pM to about 900 pM, about 600 pM to about 850 pM, about 600 pM to about 800 pM, about 600 pM to about 750 pM, about 600 pM to about 700 pM, about 600 pM to about 650 pM, about 700 pM to about 5 μM, about 700 pM to about 2 μM, about 700 pM to about 1 μM, about 700 pM to about 500 nM, about 700 pM to about 250 nM, about 700 pM to about 240 nM, about 700 pM to about 230 nM, about 700 pM to about 220 nM, about 700 pM to about 210 nM, about 700 pM to about 200 nM, about 700 pM to about 190 nM, about 700 pM to about 180 nM, about 700 pM to about 170 nM, about 700 pM to about 160 nM, about 700 pM to about 150 nM, about 700 pM to about 140 nM, about 700 pM to about 130 nM, about 700 pM to about 120 nM, about 700 pM to about 110 nM, about 700 pM to about 100 nM, about 700 pM to about 95 nM, about 700 pM to about 90 nM, about 700 pM to about 85 nM, about 700 pM to about 80 nM, about 700 pM to about 75 nM, about 700 pM to about 70 nM, about 700 pM to about 65 nM, about 700 pM to about 60 nM, about 700 pM to about 55 nM, about 700 pM to about 50 nM, about 700 pM to about 45 nM, about 700 pM to about 40 nM, about 700 pM to about 35 nM, about 700 pM to about 30 nM, about 700 pM to about 25 nM, about 700 pM to about 20 nM, about 700 pM to about 15 nM, about 700 pM to about 10 nM, about 700 pM to about 5 nM, about 700 pM to about 2 nM, about 700 pM to about 1 nM, about 700 pM to about 950 pM, about 700 pM to about 900 pM, about 700 pM to about 850 pM, about 700 pM to about 800 pM, about 700 pM to about 750 pM, about 800 pM to about 5 μM, about 800 pM to about 2 μM, about 800 pM to about 1 μM, about 800 pM to about 500 nM, about 800 pM to about 250 nM, about 800 pM to about 240 nM, about 800 pM to about 230 nM, about 800 pM to about 220 nM, about 800 pM to about 210 nM, about 800 pM to about 200 nM, about 800 pM to about 190 nM, about 800 pM to about 180 nM, about 800 pM to about 170 nM, about 800 pM to about 160 nM, about 800 pM to about 150 nM, about 800 pM to about 140 nM, about 800 pM to about 130 nM, about 800 pM to about 120 nM, about 800 pM to about 110 nM, about 800 pM to about 100 nM, about 800 pM to about 95 nM, about 800 pM to about 90 nM, about 800 pM to about 85 nM, about 800 pM to about 80 nM, about 800 pM to about 75 nM, about 800 pM to about 70 nM, about 800 pM to about 65 nM, about 800 pM to about 60 nM, about 800 pM to about 55 nM, about 800 pM to about 50 nM, about 800 pM to about 45 nM, about 800 pM to about 40 nM, about 800 pM to about 35 nM, about 800 pM to about 30 nM, about 800 pM to about 25 nM, about 800 pM to about 20 nM, about 800 pM to about 15 nM, about 800 pM to about 10 nM, about 800 pM to about 5 nM, about 800 pM to about 2 nM, about 800 pM to about 1 nM, about 800 pM to about 950 pM, about 800 pM to about 900 pM, about 800 pM to about 850 pM, about 900 pM to about 5 μM, about 900 pM to about 2 μM, about 900 pM to about 1 μM, about 900 pM to about 500 nM, about 900 pM to about 250 nM, about 900 pM to about 240 nM, about 900 pM to about 230 nM, about 900 pM to about 220 nM, about 900 pM to about 210 nM, about 900 pM to about 200 nM, about 900 pM to about 190 nM, about 900 pM to about 180 nM, about 900 pM to about 170 nM, about 900 pM to about 160 nM, about 900 pM to about 150 nM, about 900 pM to about 140 nM, about 900 pM to about 130 nM, about 900 pM to about 120 nM, about 900 pM to about 110 nM, about 900 pM to about 100 nM, about 900 pM to about 95 nM, about 900 pM to about 90 nM, about 900 pM to about 85 nM, about 900 pM to about 80 nM, about 900 pM to about 75 nM, about 900 pM to about 70 nM, about 900 pM to about 65 nM, about 900 pM to about 60 nM, about 900 pM to about 55 nM, about 900 pM to about 50 nM, about 900 pM to about 45 nM, about 900 pM to about 40 nM, about 900 pM to about 35 nM, about 900 pM to about 30 nM, about 900 pM to about 25 nM, about 900 pM to about 20 nM, about 900 pM to about 15 nM, about 900 pM to about 10 nM, about 900 pM to about 5 nM, about 900 pM to about 2 nM, about 900 pM to about 1 nM, about 900 pM to about 950 pM, about 1 nM to about 5 μM, about 1 nM to about 2 μM, about 1 nM to about 1 μM, about 1 nM to about 500 nM, about 1 nM to about 250 nM, about 1 nM to about 240 nM, about 1 nM to about 230 nM, about 1 nM to about 220 nM, about 1 nM to about 210 nM, about 1 nM to about 200 nM, about 1 nM to about 190 nM, about 1 nM to about 180 nM, about 1 nM to about 170 nM, about 1 nM to about 160 nM, about 1 nM to about 150 nM, about 1 nM to about 140 nM, about 1 nM to about 130 nM, about 1 nM to about 120 nM, about 1 nM to about 110 nM, about 1 nM to about 100 nM, about 1 nM to about 95 nM, about 1 nM to about 90 nM, about 1 nM to about 85 nM, about 1 nM to about 80 nM, about 1 nM to about 75 nM, about 1 nM to about 70 nM, about 1 nM to about 65 nM, about 1 nM to about 60 nM, about 1 nM to about 55 nM, about 1 nM to about 50 nM, about 1 nM to about 45 nM, about 1 nM to about 40 nM, about 1 nM to about 35 nM, about 1 nM to about 30 nM, about 1 nM to about 25 nM, about 1 nM to about 20 nM, about 1 nM to about 15 nM, about 1 nM to about 10 nM, about 1 nM to about 5 nM, about 2 nM to about 5 μM, about 2 nM to about 2 μM, about 2 nM to about 1 μM, about 2 nM to about 500 nM, about 2 nM to about 250 nM, about 2 nM to about 240 nM, about 2 nM to about 230 nM, about 2 nM to about 220 nM, about 2 nM to about 210 nM, about 2 nM to about 200 nM, about 2 nM to about 190 nM, about 2 nM to about 180 nM, about 2 nM to about 170 nM, about 2 nM to about 160 nM, about 2 nM to about 150 nM, about 2 nM to about 140 nM, about 2 nM to about 130 nM, about 2 nM to about 120 nM, about 2 nM to about 110 nM, about 2 nM to about 100 nM, about 2 nM to about 95 nM, about 2 nM to about 90 nM, about 2 nM to about 85 nM, about 2 nM to about 80 nM, about 2 nM to about 75 nM, about 2 nM to about 70 nM, about 2 nM to about 65 nM, about 2 nM to about 60 nM, about 2 nM to about 55 nM, about 2 nM to about 50 nM, about 2 nM to about 45 nM, about 2 nM to about 40 nM, about 2 nM to about 35 nM, about 2 nM to about 30 nM, about 2 nM to about 25 nM, about 2 nM to about 20 nM, about 2 nM to about 15 nM, about 2 nM to about 10 nM, about 2 nM to about 5 nM, about 4 nM to about 5 μM, about 4 nM to about 2 μM, about 4 nM to about 1 μM, about 4 nM to about 500 nM, about 4 nM to about 250 nM, about 4 nM to about 240 nM, about 4 nM to about 230 nM, about 4 nM to about 220 nM, about 4 nM to about 210 nM, about 4 nM to about 200 nM, about 4 nM to about 190 nM, about 4 nM to about 180 nM, about 4 nM to about 170 nM, about 4 nM to about 160 nM, about 4 nM to about 150 nM, about 4 nM to about 140 nM, about 4 nM to about 130 nM, about 4 nM to about 120 nM, about 4 nM to about 110 nM, about 4 nM to about 100 nM, about 4 nM to about 95 nM, about 4 nM to about 90 nM, about 4 nM to about 85 nM, about 4 nM to about 80 nM, about 4 nM to about 75 nM, about 4 nM to about 70 nM, about 4 nM to about 65 nM, about 4 nM to about 60 nM, about 4 nM to about 55 nM, about 4 nM to about 50 nM, about 4 nM to about 45 nM, about 4 nM to about 40 nM, about 4 nM to about 35 nM, about 4 nM to about 30 nM, about 4 nM to about 25 nM, about 4 nM to about 20 nM, about 4 nM to about 15 nM, about 4 nM to about 10 nM, about 4 nM to about 5 nM, about 5 nM to about 5 μM, about 5 nM to about 2 μM, about 5 nM to about 1 μM, about 5 nM to about 500 nM, about 5 nM to about 250 nM, about 5 nM to about 240 nM, about 5 nM to about 230 nM, about 5 nM to about 220 nM, about 5 nM to about 210 nM, about 5 nM to about 200 nM, about 5 nM to about 190 nM, about 5 nM to about 180 nM, about 5 nM to about 170 nM, about 5 nM to about 160 nM, about 5 nM to about 150 nM, about 5 nM to about 140 nM, about 5 nM to about 130 nM, about 5 nM to about 120 nM, about 5 nM to about 110 nM, about 5 nM to about 100 nM, about 5 nM to about 95 nM, about 5 nM to about 90 nM, about 5 nM to about 85 nM, about 5 nM to about 80 nM, about 5 nM to about 75 nM, about 5 nM to about 70 nM, about 5 nM to about 65 nM, about 5 nM to about 60 nM, about 5 nM to about 55 nM, about 5 nM to about 50 nM, about 5 nM to about 45 nM, about 5 nM to about 40 nM, about 5 nM to about 35 nM, about 5 nM to about 30 nM, about 5 nM to about 25 nM, about 5 nM to about 20 nM, about 5 nM to about 15 nM, about 5 nM to about 10 nM, about 10 nM to about 5 μM, about 10 nM to about 2 μM, about 10 nM to about 1 μM, about 10 nM to about 500 nM, about 10 nM to about 250 nM, about 10 nM to about 240 nM, about 10 nM to about 230 nM, about 10 nM to about 220 nM, about 10 nM to about 210 nM, about 10 nM to about 200 nM, about 10 nM to about 190 nM, about 10 nM to about 180 nM, about 10 nM to about 170 nM, about 10 nM to about 160 nM, about 10 nM to about 150 nM, about 10 nM to about 140 nM, about 10 nM to about 130 nM, about 10 nM to about 120 nM, about 10 nM to about 110 nM, about 10 nM to about 100 nM, about 10 nM to about 95 nM, about 10 nM to about 90 nM, about 10 nM to about 85 nM, about 10 nM to about 80 nM, about 10 nM to about 75 nM, about 10 nM to about 70 nM, about 10 nM to about 65 nM, about 10 nM to about 60 nM, about 10 nM to about 55 nM, about 10 nM to about 50 nM, about 10 nM to about 45 nM, about 10 nM to about 40 nM, about 10 nM to about 35 nM, about 10 nM to about 30 nM, about 10 nM to about 25 nM, about 10 nM to about 20 nM, about 10 nM to about 15 nM, about 15 nM to about 5 μM, about 15 nM to about 2 μM, about 15 nM to about 1 μM, about 15 nM to about 500 nM, about 15 nM to about 250 nM, about 15 nM to about 240 nM, about 15 nM to about 230 nM, about 15 nM to about 220 nM, about 15 nM to about 210 nM, about 15 nM to about 200 nM, about 15 nM to about 190 nM, about 15 nM to about 180 nM, about 15 nM to about 170 nM, about 15 nM to about 160 nM, about 15 nM to about 150 nM, about 15 nM to about 140 nM, about 15 nM to about 130 nM, about 15 nM to about 120 nM, about 15 nM to about 110 nM, about 15 nM to about 100 nM, about 15 nM to about 95 nM, about 15 nM to about 90 nM, about 15 nM to about 85 nM, about 15 nM to about 80 nM, about 15 nM to about 75 nM, about 15 nM to about 70 nM, about 15 nM to about 65 nM, about 15 nM to about 60 nM, about 15 nM to about 55 nM, about 15 nM to about 50 nM, about 15 nM to about 45 nM, about 15 nM to about 40 nM, about 15 nM to about 35 nM, about 15 nM to about 30 nM, about 15 nM to about 25 nM, about 15 nM to about 20 nM, about 20 nM to about 5 μM, about 20 nM to about 2 μM, about 20 nM to about 1 μM, about 20 nM to about 500 nM, about 20 nM to about 250 nM, about 20 nM to about 240 nM, about 20 nM to about 230 nM, about 20 nM to about 220 nM, about 20 nM to about 210 nM, about 20 nM to about 200 nM, about 20 nM to about 190 nM, about 20 nM to about 180 nM, about 20 nM to about 170 nM, about 20 nM to about 160 nM, about 20 nM to about 150 nM, about 20 nM to about 140 nM, about 20 nM to about 130 nM, about 20 nM to about 120 nM, about 20 nM to about 110 nM, about 20 nM to about 100 nM, about 20 nM to about 95 nM, about 20 nM to about 90 nM, about 20 nM to about 85 nM, about 20 nM to about 80 nM, about 20 nM to about 75 nM, about 20 nM to about 70 nM, about 20 nM to about 65 nM, about 20 nM to about 60 nM, about 20 nM to about 55 nM, about 20 nM to about 50 nM, about 20 nM to about 45 nM, about 20 nM to about 40 nM, about 20 nM to about 35 nM, about 20 nM to about 30 nM, about 20 nM to about 25 nM, about 25 nM to about 5 μM, about 25 nM to about 2 μM, about 25 nM to about 1 μM, about 25 nM to about 500 nM, about 25 nM to about 250 nM, about 25 nM to about 240 nM, about 25 nM to about 230 nM, about 25 nM to about 220 nM, about 25 nM to about 210 nM, about 25 nM to about 200 nM, about 25 nM to about 190 nM, about 25 nM to about 180 nM, about 25 nM to about 170 nM, about 25 nM to about 160 nM, about 25 nM to about 150 nM, about 25 nM to about 140 nM, about 25 nM to about 130 nM, about 25 nM to about 120 nM, about 25 nM to about 110 nM, about 25 nM to about 100 nM, about 25 nM to about 95 nM, about 25 nM to about 90 nM, about 25 nM to about 85 nM, about 25 nM to about 80 nM, about 25 nM to about 75 nM, about 25 nM to about 70 nM, about 25 nM to about 65 nM, about 25 nM to about 60 nM, about 25 nM to about 55 nM, about 25 nM to about 50 nM, about 25 nM to about 45 nM, about 25 nM to about 40 nM, about 25 nM to about 35 nM, about 25 nM to about 30 nM, about 30 nM to about 5 μM, about 30 nM to about 2 μM, about 30 nM to about 1 μM, about 30 nM to about 500 nM, about 30 nM to about 250 nM, about 30 nM to about 240 nM, about 30 nM to about 230 nM, about 30 nM to about 220 nM, about 30 nM to about 210 nM, about 30 nM to about 200 nM, about 30 nM to about 190 nM, about 30 nM to about 180 nM, about 30 nM to about 170 nM, about 30 nM to about 160 nM, about 30 nM to about 150 nM, about 30 nM to about 140 nM, about 30 nM to about 130 nM, about 30 nM to about 120 nM, about 30 nM to about 110 nM, about 30 nM to about 100 nM, about 30 nM to about 95 nM, about 30 nM to about 90 nM, about 30 nM to about 85 nM, about 30 nM to about 80 nM, about 30 nM to about 75 nM, about 30 nM to about 70 nM, about 30 nM to about 65 nM, about 30 nM to about 60 nM, about 30 nM to about 55 nM, about 30 nM to about 50 nM, about 30 nM to about 45 nM, about 30 nM to about 40 nM, about 30 nM to about 35 nM, about 40 nM to about 5 μM, about 40 nM to about 2 μM, about 40 nM to about 1 μM, about 40 nM to about 500 nM, about 40 nM to about 250 nM, about 40 nM to about 240 nM, about 40 nM to about 230 nM, about 40 nM to about 220 nM, about 40 nM to about 210 nM, about 40 nM to about 200 nM, about 40 nM to about 190 nM, about 40 nM to about 180 nM, about 40 nM to about 170 nM, about 40 nM to about 160 nM, about 40 nM to about 150 nM, about 40 nM to about 140 nM, about 40 nM to about 130 nM, about 40 nM to about 120 nM, about 40 nM to about 110 nM, about 40 nM to about 100 nM, about 40 nM to about 95 nM, about 40 nM to about 90 nM, about 40 nM to about 85 nM, about 40 nM to about 80 nM, about 40 nM to about 75 nM, about 40 nM to about 70 nM, about 40 nM to about 65 nM, about 40 nM to about 60 nM, about 40 nM to about 55 nM, about 40 nM to about 50 nM, about 40 nM to about 45 nM, about 50 nM to about 5 μM, about 50 nM to about 2 μM, about 50 nM to about 1 μM, about 50 nM to about 500 nM, about 50 nM to about 250 nM, about 50 nM to about 240 nM, about 50 nM to about 230 nM, about 50 nM to about 220 nM, about 50 nM to about 210 nM, about 50 nM to about 200 nM, about 50 nM to about 190 nM, about 50 nM to about 180 nM, about 50 nM to about 170 nM, about 50 nM to about 160 nM, about 50 nM to about 150 nM, about 50 nM to about 140 nM, about 50 nM to about 130 nM, about 50 nM to about 120 nM, about 50 nM to about 110 nM, about 50 nM to about 100 nM, about 50 nM to about 95 nM, about 50 nM to about 90 nM, about 50 nM to about 85 nM, about 50 nM to about 80 nM, about 50 nM to about 75 nM, about 50 nM to about 70 nM, about 50 nM to about 65 nM, about 50 nM to about 60 nM, about 50 nM to about 55 nM, about 60 nM to about 5 μM, about 60 nM to about 2 μM, about 60 nM to about 1 μM, about 60 nM to about 500 nM, about 60 nM to about 250 nM, about 60 nM to about 240 nM, about 60 nM to about 230 nM, about 60 nM to about 220 nM, about 60 nM to about 210 nM, about 60 nM to about 200 nM, about 60 nM to about 190 nM, about 60 nM to about 180 nM, about 60 nM to about 170 nM, about 60 nM to about 160 nM, about 60 nM to about 150 nM, about 60 nM to about 140 nM, about 60 nM to about 130 nM, about 60 nM to about 120 nM, about 60 nM to about 110 nM, about 60 nM to about 100 nM, about 60 nM to about 95 nM, about 60 nM to about 90 nM, about 60 nM to about 85 nM, about 60 nM to about 80 nM, about 60 nM to about 75 nM, about 60 nM to about 70 nM, about 60 nM to about 65 nM, about 70 nM to about 5 μM, about 70 nM to about 2 μM, about 70 nM to about 1 μM, about 70 nM to about 500 nM, about 70 nM to about 250 nM, about 70 nM to about 240 nM, about 70 nM to about 230 nM, about 70 nM to about 220 nM, about 70 nM to about 210 nM, about 70 nM to about 200 nM, about 70 nM to about 190 nM, about 70 nM to about 180 nM, about 70 nM to about 170 nM, about 70 nM to about 160 nM, about 70 nM to about 150 nM, about 70 nM to about 140 nM, about 70 nM to about 130 nM, about 70 nM to about 120 nM, about 70 nM to about 110 nM, about 70 nM to about 100 nM, about 70 nM to about 95 nM, about 70 nM to about 90 nM, about 70 nM to about 85 nM, about 70 nM to about 80 nM, about 70 nM to about 75 nM, about 80 nM to about 5 μM, about 80 nM to about 2 μM, about 80 nM to about 1 μM, about 80 nM to about 500 nM, about 80 nM to about 250 nM, about 80 nM to about 240 nM, about 80 nM to about 230 nM, about 80 nM to about 220 nM, about 80 nM to about 210 nM, about 80 nM to about 200 nM, about 80 nM to about 190 nM, about 80 nM to about 180 nM, about 80 nM to about 170 nM, about 80 nM to about 160 nM, about 80 nM to about 150 nM, about 80 nM to about 140 nM, about 80 nM to about 130 nM, about 80 nM to about 120 nM, about 80 nM to about 110 nM, about 80 nM to about 100 nM, about 80 nM to about 95 nM, about 80 nM to about 90 nM, about 80 nM to about 85 nM, about 90 nM to about 5 μM, about 90 nM to about 2 μM, about 90 mM to about 1 μM, about 90 nM to about 500 nM, about 90 nM to about 250 nM, about 90 nM to about 240 nM, about 90 nM to about 230 nM, about 90 nM to about 220 nM, about 90 nM to about 210 nM, about 90 nM to about 200 nM, about 90 nM to about 190 nM, about 90 nM to about 180 nM, about 90 nM to about 170 nM, about 90 nM to about 160 nM, about 90 nM to about 150 nM, about 90 nM to about 140 nM, about 90 nM to about 130 nM, about 90 nM to about 120 nM, about 90 nM to about 110 nM, about 90 nM to about 100 nM, about 90 nM to about 95 nM, about 100 nM to about 5 μM, about 100 nM to about 2 μM, about 100 nM to about 1 μM, about 100 nM to about 500 nM, about 100 nM to about 250 nM, about 100 nM to about 240 nM, about 100 nM to about 230 nM, about 100 nM to about 220 nM, about 100 nM to about 210 nM, about 100 nM to about 200 nM, about 100 nM to about 190 nM, about 100 nM to about 180 nM, about 100 nM to about 170 nM, about 100 nM to about 160 nM, about 100 nM to about 150 nM, about 100 nM to about 140 nM, about 100 nM to about 130 nM, about 100 nM to about 120 nM, about 100 nM to about 110 nM, about 110 nM to about 5 μM, about 110 nM to about 2 μM, about 110 nM to about 1 μM, about 110 nM to about 500 nM, about 110 nM to about 250 nM, about 110 nM to about 240 nM, about 110 nM to about 230 nM, about 110 nM to about 220 nM, about 110 nM to about 210 nM, about 110 nM to about 200 nM, about 110 nM to about 190 nM, about 110 nM to about 180 nM, about 110 nM to about 170 nM, about 110 nM to about 160 nM, about 110 nM to about 150 nM, about 110 nM to about 140 nM, about 110 nM to about 130 nM, about 110 nM to about 120 nM, about 120 nM to about 5 μM, about 120 nM to about 2 μM, about 120 nM to about 1 μM, about 120 nM to about 500 nM, about 120 nM to about 250 nM, about 120 nM to about 240 nM, about 120 nM to about 230 nM, about 120 nM to about 220 nM, about 120 nM to about 210 nM, about 120 nM to about 200 nM, about 120 nM to about 190 nM, about 120 nM to about 180 nM, about 120 nM to about 170 nM, about 120 nM to about 160 nM, about 120 nM to about 150 nM, about 120 nM to about 140 nM, about 120 nM to about 130 nM, about 130 nM to about 5 μM, about 130 nM to about 2 μM, about 130 nM to about 1 μM, about 130 nM to about 500 nM, about 130 nM to about 250 nM, about 130 nM to about 240 nM, about 130 nM to about 230 nM, about 130 nM to about 220 nM, about 130 nM to about 210 nM, about 130 nM to about 200 nM, about 130 nM to about 190 nM, about 130 nM to about 180 nM, about 130 nM to about 170 nM, about 130 nM to about 160 nM, about 130 nM to about 150 nM, about 130 nM to about 140 nM, about 140 nM to about 5 μM, about 140 nM to about 2 μM, about 140 nM to about 1 μM, about 140 nM to about 500 nM, about 140 nM to about 250 nM, about 140 nM to about 240 nM, about 140 nM to about 230 nM, about 140 nM to about 220 nM, about 140 nM to about 210 nM, about 140 nM to about 200 nM, about 140 nM to about 190 nM, about 140 nM to about 180 nM, about 140 nM to about 170 nM, about 140 nM to about 160 nM, about 140 nM to about 150 nM, about 150 nM to about 5 μM, about 150 nM to about 2 μM, about 150 nM to about 1 μM, about 150 nM to about 500 nM, about 150 nM to about 250 nM, about 150 nM to about 240 nM, about 150 nM to about 230 nM, about 150 nM to about 220 nM, about 150 nM to about 210 nM, about 150 nM to about 200 nM, about 150 nM to about 190 nM, about 150 nM to about 180 nM, about 150 nM to about 170 nM, about 150 nM to about 160 nM, about 160 nM to about 5 μM, about 160 nM to about 2 μM, about 160 nM to about 1 μM, about 160 nM to about 500 nM, about 160 nM to about 250 nM, about 160 nM to about 240 nM, about 160 nM to about 230 nM, about 160 nM to about 220 nM, about 160 nM to about 210 nM, about 160 nM to about 200 nM, about 160 nM to about 190 nM, about 160 nM to about 180 nM, about 160 nM to about 170 nM, about 170 nM to about 5 μM, about 170 nM to about 2 μM, about 170 nM to about 1 μM, about 170 nM to about 500 nM, about 170 nM to about 250 nM, about 170 nM to about 240 nM, about 170 nM to about 230 nM, about 170 nM to about 220 nM, about 170 nM to about 210 nM, about 170 nM to about 200 nM, about 170 nM to about 190 nM, about 170 nM to about 180 nM, about 180 nM to about 5 μM, about 180 nM to about 2 μM, about 180 nM to about 1 μM, about 180 nM to about 500 nM, about 180 nM to about 250 nM, about 180 nM to about 240 nM, about 180 nM to about 230 nM, about 180 nM to about 220 nM, about 180 nM to about 210 nM, about 180 nM to about 200 nM, about 180 nM to about 190 nM, about 190 nM to about 5 μM, about 190 nM to about 2 μM, about 190 nM to about 1 μM, about 190 nM to about 500 nM, about 190 nM to about 250 nM, about 190 nM to about 240 nM, about 190 nM to about 230 nM, about 190 nM to about 220 nM, about 190 nM to about 210 nM, about 190 nM to about 200 nM, about 200 nM to about 5 μM, about 200 nM to about 2 μM, about 200 nM to about 1 μM, about 200 nM to about 500 nM, about 200 nM to about 250 nM, about 200 nM to about 240 nM, about 200 nM to about 230 nM, about 200 nM to about 220 nM, about 200 nM to about 210 nM, about 210 nM to about 5 μM, about 210 nM to about 2 μM, about 210 nM to about 1 nM, about 210 nM to about 500 nM, about 210 nM to about 250 nM, about 210 nM to about 240 nM, about 210 nM to about 230 nM, about 210 nM to about 220 nM, about 220 nM to about 5 μM, about 220 nM to about 2 μM, about 220 nM to about 1 μM, about 220 nM to about 500 nM, about 220 nM to about 250 nM, about 220 nM to about 240 nM, about 220 nM to about 230 nM, about 230 nM to about 5 μM, about 230 nM to about 2 μM, about 230 nM to about 1 μM, about 230 nM to about 500 nM, about 230 nM to about 250 nM, about 230 nM to about 240 nM, about 240 nM to about 5 μM, about 240 nM to about 2 μM, about 240 nM to about 1 μM, about 240 nM to about 500 nM, about 240 nM to about 250 nM, about 250 nM to about 5 μM, about 250 nM to about 2 μM, about 250 nM to about 1 μM, about 250 nM to about 500 nM, about 500 nM to about 5 μM, about 500 nM to about 2 μM, about 500 nM to about 1 μM, about 1 μM to about 5 μM, about 1 μM to about 2 μM, or about 2 μM to about 5 μM).

[0785] In some embodiments of any of the ABPCs described herein, the K_{D} of the first antigen-binding domain (and optionally, the second antigen-binding domain, if present) at a pH of about 4.0 to about 6.5 (e.g., any of the subranges of this range described herein) can be greater than 1 nM (e.g., between about 1 nM to about 1 mM, about 1 nM to about 900 μM, about 1 nM to about 800 μM, about 1 nM to about 700 μM, about 1 nM to about 600 μM, about 1 nM to about 500 μM, about 1 nM to about 400 μM, about 1 nM to about 300 μM, about 1 nM to about 200 μM, about 1 nM to about 100 μM, about 1 nM to about 90 μM, about 1 nM to about 80 μM, about 1 nM to about 70 μM, about 1 nM to about 60 μM, about 1 nM to about 50 μM, about 1 nM to about 40 μM, about 1 nM to about 30 μM, about 1 nM to about 20 μM, about 1 nM to about 10 μM, about 1 nM to about 5 μM, about 1 nM to about 4 μM, about 1 nM to about 2 μM, about 1 nM to about 1 μM, about 1 nM to about 900 nM, about 1 nM to about 800 nM, about 1 nM to about 700 nM, about 1 nM to about 600 nM, about 1 nM to about 500 nM, about 1 nM to about 400 nM, about 1 nM to about 300 nM, about 1 nM to about 200 nM, about 1 nM to about 100 nM, about 1 nM to about 90 nM, about 1 nM to about 80 nM, about 1 nM to about 70 nM, about 1 nM to about 60 nM, about 1 nM to about 50 nM, about 1 nM to about 40 nM, about 1 nM to about 30 nM, about 2 nM to about 1 mM, about 2 nM to about 900 μM, about 2 nM to about 800 μM, about 2 nM to about 700 μM, about 2 nM to about 600 μM, about 2 nM to about 500 μM, about 2 nM to about 400 μM, about 2 nM to about 300 μM, about 2 nM to about 200 μM, about 2 nM to about 100 μM, about 2 nM to about 90 μM, about 2 nM to about 80 μM, about 2 nM to about 70 μM, about 2 nM to about 60 μM, about 2 nM to about 50 μM, about 2 nM to about 40 μM, about 2 nM to about 30 μM, about 2 nM to about 20 μM, about 2 nM to about 10 μM, about 2 nM to about 5 μM, about 2 nM to about 4 μM, about 2 nM to about 2 μM, about 2 nM to about 1 μM, about 2 nM to about 900 nM, about 2 nM to about 800 nM, about 2 nM to about 700 nM, about 2 nM to about 600 nM, about 2 nM to about 500 nM, about 2 nM to about 400 nM, about 2 nM to about 300 nM, about 2 nM to about 200 nM, about 2 nM to about 100 nM, about 2 nM to about 90 nM, about 2 nM to about 80 nM, about 2 nM to about 70 nM, about 2 nM to about 60 nM, about 2 nM to about 50 nM, about 2 nM to about 40 nM, about 2 nM to about 30 nM, about 5 nM to about 1 mM, about 5 nM to about 900 μM, about 5 nM to about 800 μM, about 5 nM to about 700 μM, about 5 nM to about 600 μM, about 5 nM to about 500 μM, about 5 nM to about 400 μM, about 5 nM to about 300 μM, about 5 nM to about 200 μM, about 5 nM to about 100 μM, about 5 nM to about 90 μM, about 5 nM to about 80 μM, about 5 nM to about 70 μM, about 5 nM to about 60 μM, about 5 nM to about 50 μM, about 5 nM to about 40 μM, about 5 nM to about 30 μM, about 5 nM to about 20 μM, about 5 nM to about 10 μM, about 5 nM to about 5 μM, about 5 nM to about 4 μM, about 5 nM to about 2 μM, about 5 nM to about 1 μM, about 5 nM to about 900 nM, about 5 nM to about 800 nM, about 5 nM to about 700 nM, about 5 nM to about 600 nM, about 5 nM to about 500 nM, about 5 nM to about 400 nM, about 5 nM to about 300 nM, about 5 nM to about 200 nM, about 5 nM to about 100 nM, about 5 nM to about 90 nM, about 5 nM to about 80 nM, about 5 nM to about 70 nM, about 5 nM to about 60 nM, about 5 nM to about 50 nM, about 5 nM to about 40 nM, about 5 nM to about 30 nM, about 10 nM to about 1 mM, about 10 nM to about 900 μM, about 10 nM to about 800 μM, about 10 nM to about 700 μM, about 10 nM to about 600 μM, about 10 nM to about 500 μM, about 10 nM to about 400 μM, about 10 nM to about 300 μM, about 10 nM to about 200 μM, about 10 nM to about 100 μM, about 10 nM to about 90 μM, about 10 nM to about 80 μM, about 10 nM to about 70 μM, about 10 nM to about 60 μM, about 10 nM to about 50 μM, about 10 nM to about 40 μM, about 10 nM to about 30 μM, about 10 nM to about 20 μM, about 10 nM to about 10 μM, about 10 nM to about 5 μM, about 10 nM to about 4 μM, about 10 nM to about 2 μM, about 10 nM to about 1 μM, about 10 nM to about 900 nM, about 10 nM to about 800 nM, about 10 nM to about 700 nM, about 10 nM to about 600 nM, about 10 nM to about 500 nM, about 10 nM to about 400 nM, about 10 nM to about 300 nM, about 10 nM to about 200 nM, about 10 nM to about 100 nM, about 10 nM to about 90 nM, about 10 nM to about 80 nM, about 10 nM to about 70 nM, about 10 nM to about 60 nM, about 10 nM to about 50 nM, about 10 nM to about 40 nM, about 10 nM to about 30 nM, about 20 nM to about 1 mM, about 20 nM to about 900 μM, about 20 nM to about 800 μM, about 20 nM to about 700 μM, about 20 nM to about 600 μM, about 20 nM to about 500 μM, about 20 nM to about 400 μM, about 20 nM to about 300 μM, about 20 nM to about 200 μM, about 20 nM to about 100 μM, about 20 nM to about 90 μM, about 20 nM to about 80 μM, about 20 nM to about 70 μM, about 20 nM to about 60 μM, about 20 nM to about 50 μM, about 20 nM to about 40 μM, about 20 nM to about 30 μM, about 20 nM to about 20 μM, about 20 nM to about 10 μM, about 20 nM to about 5 μM, about 20 nM to about 4 μM, about 20 nM to about 2 μM, about 20 nM to about 1 μM, about 20 nM to about 900 nM, about 20 nM to about 800 nM, about 20 nM to about 700 nM, about 20 nM to about 600 nM, about 20 nM to about 500 nM, about 20 nM to about 400 nM, about 20 nM to about 300 nM, about 20 nM to about 200 nM, about 20 nM to about 100 nM, about 20 nM to about 90 nM, about 20 nM to about 80 nM, about 20 nM to about 70 nM, about 20 nM to about 60 nM, about 20 nM to about 50 nM, about 20 nM to about 40 nM, about 20 nM to about 30 nM; about 1 μM to about 1 mM, about 1 μM to about 900 μM, about 1 μM to about 800 μM, about 1 μM to about 700 μM, about 1 μM to about 600 μM, about 1 μM to about 500 μM, about 1 μM to about 400 μM, about 1 μM to about 300 μM, about 1 μM to about 200 μM, about 1 μM to about 100 μM, about 1 μM to about 90 μM, about 1 μM to about 80 μM, about 1 μM to about 70 μM, about 1 μM to about 60 μM, about 1 μM to about 50 μM, about 1 μM to about 40 μM, about 1 μM to about 30 μM, about 1 μM to about 20 μM, about 1 μM to about 10 μM, about 1 μM to about 5 μM, about 1 μM to about 4 μM, about 1 μM to about 3 μM, about 1 μM to about 2 μM, about 2 μM to about 1 mM, about 2 μM to about 900 μM, about 2 μM to about 800 μM, about 2 μM to about 700 μM, about 2 μM to about 600 μM, about 2 μM to about 500 μM, about 2 μM to about 400 μM, about 2 μM to about 300 μM, about 2 μM to about 200 μM, about 2 μM to about 100 μM, about 2 μM to about 90 μM, about 2 μM to about 80 μM, about 2 μM to about 70 μM, about 2 μM to about 60 μM, about 2 μM to about 50 μM, about 2 μM to about 40 μM, about 2 μM to about 30 μM, about 2 μM to about 20 μM, about 2 μM to about 10 μM, about 2 μM to about 5 μM, about 2 μM to about 4 μM, about 2 μM to about 3 μM, about 5 μM to about 1 mM, about 5 μM to about 900 μM, about 5 μM to about 800 μM, about 5 μM to about 700 μM, about 5 μM to about 600 μM, about 5 μM to about 500 μM, about 5 μM to about 400 μM, about 5 μM to about 300 μM, about 5 μM to about 200 μM, about 5 μM to about 100 μM, about 5 μM to about 90 μM, about 5 μM to about 80 μM, about 5 μM to about 70 μM, about 5 μM to about 60 μM, about 5 μM to about 50 μM, about 5 μM to about 40 μM, about 5 μM to about 30 μM, about 5 μM to about 20 μM, about 5 μM to about 10 μM, about 10 μM to about 1 mM, about 10 μM to about 900 μM, about 10 μM to about 800 μM, about 10 μM to about 700 μM, about 10 μM to about 600 μM, about 10 μM to about 500 μM, about 10 μM to about 400 μM, about 10 μM to about 300 μM, about 10 μM to about 200 μM, about 10 μM to about 100 μM, about 10 μM to about 90 μM, about 10 μM to about 80 μM, about 10 μM to about 70 μM, about 10 μM to about 60 μM, about 10 μM to about 50 μM, about 10 μM to about 40 μM, about 10 μM to about 30 μM, about 10 μM to about 20 μM, about 20 μM to about 1 mM, about 20 μM to about 900 μM, about 20 μM to about 800 μM, about 20 μM to about 700 μM, about 20 μM to about 600 μM, about 20 μM to about 500 μM, about 20 μM to about 400 μM, about 20 μM to about 300 μM, about 20 μM to about 200 μM, about 20 μM to about 100 μM, about 20 μM to about 90 μM, about 20 μM to about 80 μM, about 20 μM to about 70 μM, about 20 μM to about 60 μM, about 20 μM to about 50 μM, about 20 μM to about 40 μM, about 20 μM to about 30 μM, about 30 μM to about 1 mM, about 30 μM to about 900 μM, about 30 μM to about 800 μM, about 30 μM to about 700 μM, about 30 μM to about 600 μM, about 30 μM to about 500 μM, about 30 μM to about 400 μM, about 30 μM to about 300 μM, about 30 μM to about 200 μM, about 30 μM to about 100 μM, about 30 μM to about 90 μM, about 30 μM to about 80 μM, about 30 μM to about 70 μM, about 30 μM to about 60 μM, about 30 μM to about 50 μM, about 30 μM to about 40 μM, about 40 μM to about 1 mM, about 40 μM to about 900 μM, about 40 μM to about 800 μM, about 40 μM to about 700 μM, about 40 μM to about 600 μM, about 40 μM to about 500 μM, about 40 μM to about 400 μM, about 40 μM to about 300 μM, about 40 μM to about 200 μM, about 40 μM to about 100 μM, about 40 μM to about 90 μM, about 40 μM to about 80 μM, about 40 μM to about 70 μM, about 40 μM to about 60 μM, about 40 μM to about 50 μM, about 50 μM to about 1 mM, about 50 μM to about 900 μM, about 50 μM to about 800 μM, about 50 μM to about 700 μM, about 50 μM to about 600 μM, about 50 μM to about 500 μM, about 50 μM to about 400 μM, about 50 μM to about 300 μM, about 50 μM to about 200 μM, about 50 μM to about 100 μM, about 50 μM to about 90 μM, about 50 μM to about 80 μM, about 50 μM to about 70 μM, about 50 μM to about 60 μM, about 60 μM to about 1 mM, about 60 μM to about 900 μM, about 60 μM to about 800 μM, about 60 μM to about 700 μM, about 60 μM to about 600 μM, about 60 μM to about 500 μM, about 60 μM to about 400 μM, about 60 μM to about 300 μM, about 60 μM to about 200 μM, about 60 μM to about 100 μM, about 60 μM to about 90 μM, about 60 μM to about 80 μM, about 60 μM to about 70 μM, about 70 μM to about 1 mM, about 70 μM to about 900 μM, about 70 μM to about 800 μM, about 70 μM to about 700 μM, about 70 μM to about 600 μM, about 70 μM to about 500 μM, about 70 μM to about 400 μM, about 70 μM to about 300 μM, about 70 μM to about 200 μM, about 70 μM to about 100 μM, about 70 μM to about 90 μM, about 70 μM to about 80 μM, about 80 μM to about 1 mM, about 80 μM to about 900 μM, about 80 μM to about 800 μM, about 80 μM to about 700 μM, about 80 μM to about 600 μM, about 80 μM to about 500 μM, about 80 μM to about 400 μM, about 80 μM to about 300 μM, about 80 μM to about 200 μM, about 80 μM to about 100 μM, about 80 μM to about 90 μM, about 90 μM to about 1 mM, about 90 μM to about 900 μM, about 90 μM to about 800 μM, about 90 μM to about 700 μM, about 90 μM to about 600 μM, about 90 μM to about 500 μM, about 90 μM to about 400 μM, about 90 μM to about 300 μM, about 90 μM to about 200 μM, about 90 μM to about 100 μM, about 100 μM to about 1 mM, about 100 μM to about 900 μM, about 100 μM to about 800 μM, about 100 μM to about 700 μM, about 100 μM to about 600 μM, about 100 μM to about 500 μM, about 100 μM to about 400 μM, about 100 μM to about 300 μM, about 100 μM to about 200 μM, about 200 μM to about 1 mM, about 200 μM to about 900 μM, about 200 μM to about 800 μM, about 200 μM to about 700 μM, about 200 μM to about 600 μM, about 200 μM to about 500 μM, about 200 μM to about 400 μM, about 200 μM to about 300 μM, about 300 μM to about 1 mM, about 300 μM to about 900 μM, about 300 μM to about 800 μM, about 300 μM to about 700 μM, about 300 μM to about 600 μM, about 300 μM to about 500 μM, about 300 μM to about 400 μM, about 400 μM to about 1 mM, about 400 μM to about 900 μM, about 400 μM to about 800 μM, about 400 μM to about 700 μM, about 400 μM to about 600 μM, about 400 μM to about 500 μM, about 500 μM to about 1 mM, about 500 μM to about 900 μM, about 500 μM to about 800 μM, about 500 μM to about 700 μM, about 500 NM to about 600 μM, about 600 μM to about 1 mM, about 600 μM to about 900 μM, about 600 μM to about 800 μM, about 600 μM to about 700 μM, about 700 μM to about 1 mM, about 700 μM to about 900 μM, about 700 μM to about 800 μM, about 800 μM to about 1 mM, about 800 μM to about 900 μM, or about 900 μM to about 1 mM).

[0786] A variety of different methods known in the art can be used to determine the K_{D} values of any of the antigen-binding protein constructs described herein (e.g., an electrophoretic mobility shift assay, a filter binding assay, surface plasmon resonance, a biomolecular binding kinetics assay, in vitro binding assay on antigen-expressing cells, etc.).

[0787] In some examples of any of the ABPCs described herein, the half-life of the ABPC in vivo is decreased (e.g., a detectable decrease) (e.g., at least a 1% decrease, at least a 5% decrease, at least a 10% decrease, at least a 15% decrease, at least a 20% decrease, at least a 25% decrease, at least a 30% decrease, at least a 35% decrease, at least a 40% decrease, at least a 45% decrease, at least a 50% decrease, at least a 55% decrease, at least a 60% decrease, at least a 65% decrease, at least a 70% decrease, at least a 75% decrease, at least a 80% decrease, at least a 85% decrease, at least a 90% decrease, at least a 95% decrease, or at least a 99% decrease, or about a 1% decrease to about a 99% decrease, about a 1% decrease to about a 95% decrease, about a 1% decrease to about a 90% decrease, about a 1% decrease to about a 85% decrease, about a 1% decrease to about a 80% decrease, about a 1% decrease to about a 75% decrease, about a 1% decrease to about a 70% decrease, about a 1% decrease to about a 65% decrease, about a 1% decrease to about a 60% decrease, about a 1% decrease to about a 55% decrease, about a 1% decrease to about a 50% decrease, about a 1% decrease to about a 45% decrease, about a 1% decrease to about a 40% decrease, about a 1% decrease to about a 35% decrease, about a 1% decrease to about a 30% decrease, about a 1% decrease to about a 25% decrease, about a 1% decrease to about a 20% decrease, about a 1% decrease to about a 15% decrease, about a 1% decrease to about a 10% decrease, about a 1% decrease to about a 5% decrease, about a 5% decrease to about a 99% decrease, about a 5% decrease to about a 95% decrease, about a 5% decrease to about a 90% decrease, about a 5% decrease to about a 85% decrease, about a 5% decrease to about a 80% decrease, about a 5% decrease to about a 75% decrease, about a 5% decrease to about a 70% decrease, about a 5% decrease to about a 65% decrease, about a 5% decrease to about a 60% decrease, about a 5% decrease to about a 55% decrease, about a 5% decrease to about a 50% decrease, about a 5% decrease to about a 45% decrease, about a 5% decrease to about a 40% decrease, about a 5% decrease to about a 35% decrease, about a 5% decrease to about a 30% decrease, about a 5% decrease to about a 25% decrease, about a 5% decrease to about a 20% decrease, about a 5% decrease to about a 15% decrease, about a 5% decrease to about a 10% decrease, about a 10% decrease to about a 99% decrease, about a 10% decrease to about a 95% decrease, about a 10% decrease to about a 90% decrease, about a 10% decrease to about a 85% decrease, about a 10% decrease to about a 80% decrease, about a 10% decrease to about a 75% decrease, about a 10% decrease to about a 70% decrease, about a 10% decrease to about a 65% decrease, about a 10% decrease to about a 60% decrease, about a 10% decrease to about a 55% decrease, about a 10% decrease to about a 50% decrease, about a 10% decrease to about a 45% decrease, about a 10% decrease to about a 40% decrease, about a 10% decrease to about a 35% decrease, about a 10% decrease to about a 30% decrease, about a 10% decrease to about a 25% decrease, about a 10% decrease to about a 20% decrease, about a 10% decrease to about a 15% decrease, about a 15% decrease to about a 99% decrease, about a 15% decrease to about a 95% decrease, about a 15% decrease to about a 90% decrease, about a 15% decrease to about a 85% decrease, about a 15% decrease to about a 80% decrease, about a 15% decrease to about a 75% decrease, about a 15% decrease to about a 70% decrease, about a 15% decrease to about a 65% decrease, about a 15% decrease to about a 60% decrease, about a 15% decrease to about a 55% decrease, about a 15% decrease to about a 50% decrease, about a 15% decrease to about a 45% decrease, about a 15% decrease to about a 40% decrease, about a 15% decrease to about a 35% decrease, about a 15% decrease to about a 30% decrease, about a 15% decrease to about a 25% decrease, about a 15% decrease to about a 20% decrease, about a 20% decrease to about a 99% decrease, about a 20% decrease to about a 95% decrease, about a 20% decrease to about a 90% decrease, about a 20% decrease to about a 85% decrease, about a 20% decrease to about a 80% decrease, about a 20% decrease to about a 75% decrease, about a 20% decrease to about a 70% decrease, about a 20% decrease to about a 65% decrease, about a 20% decrease to about a 60% decrease, about a 20% decrease to about a 55% decrease, about a 20% decrease to about a 50% decrease, about a 20% decrease to about a 45% decrease, about a 20% decrease to about a 40% decrease, about a 20% decrease to about a 35% decrease, about a 20% decrease to about a 30% decrease, about a 20% decrease to about a 25% decrease, about a 25% decrease to about a 99% decrease, about a 25% decrease to about a 95% decrease, about a 25% decrease to about a 90% decrease, about a 25% decrease to about a 85% decrease, about a 25% decrease to about a 80% decrease, about a 25% decrease to about a 75% decrease, about a 25% decrease to about a 70% decrease, about a 25% decrease to about a 65% decrease, about a 25% decrease to about a 60% decrease, about a 25% decrease to about a 55% decrease, about a 25% decrease to about a 50% decrease, about a 25% decrease to about a 45% decrease, about a 25% decrease to about a 40% decrease, about a 25% decrease to about a 35% decrease, about a 25% decrease to about a 30% decrease, about a 30% decrease to about a 99% decrease, about a 30% decrease to about a 95% decrease, about a 30% decrease to about a 90% decrease, about a 30% decrease to about a 85% decrease, about a 30% decrease to about a 80% decrease, about a 30% decrease to about a 75% decrease, about a 30% decrease to about a 70% decrease, about a 30% decrease to about a 65% decrease, about a 30% decrease to about a 60% decrease, about a 30% decrease to about a 55% decrease, about a 30% decrease to about a 50% decrease, about a 30% decrease to about a 45% decrease, about a 30% decrease to about a 40% decrease, about a 30% decrease to about a 35% decrease, about a 35% decrease to about a 99% decrease, about a 35% decrease to about a 95% decrease, about a 35% decrease to about a 90% decrease, about a 35% decrease to about a 85% decrease, about a 35% decrease to about a 80% decrease, about a 35% decrease to about a 75% decrease, about a 35% decrease to about a 70% decrease, about a 35% decrease to about a 65% decrease, about a 35% decrease to about a 60% decrease, about a 35% decrease to about a 55% decrease, about a 35% decrease to about a 50% decrease, about a 35% decrease to about a 45% decrease, about a 35% decrease to about a 40% decrease, about a 40% decrease to about a 99% decrease, about a 40% decrease to about a 95% decrease, about a 40% decrease to about a 90% decrease, about a 40% decrease to about a 85% decrease, about a 40% decrease to about a 80% decrease, about a 40% decrease to about a 75% decrease, about a 40% decrease to about a 70% decrease, about a 40% decrease to about a 65% decrease, about a 40% decrease to about a 60% decrease, about a 40% decrease to about a 55% decrease, about a 40% decrease to about a 50% decrease, about a 40% decrease to about a 45% decrease, about a 45% decrease to about a 99% decrease, about a 45% decrease to about a 95% decrease, about a 45% decrease to about a 90% decrease, about a 45% decrease to about a 85% decrease, about a 45% decrease to about a 80% decrease, about a 45% decrease to about a 75% decrease, about a 45% decrease to about a 70% decrease, about a 45% decrease to about a 65% decrease, about a 45% decrease to about a 60% decrease, about a 45% decrease to about a 55% decrease, about a 45% decrease to about a 50% decrease, about a 50% decrease to about a 99% decrease, about a 50% decrease to about a 95% decrease, about a 50% decrease to about a 90% decrease, about a 50% decrease to about a 85% decrease, about a 50% decrease to about a 80% decrease, about a 50% decrease to about a 75% decrease, about a 50% decrease to about a 70% decrease, about a 50% decrease to about a 65% decrease, about a 50% decrease to about a 60% decrease, about a 50% decrease to about a 55% decrease, about a 55% decrease to about a 99% decrease, about a 55% decrease to about a 95% decrease, about a 55% decrease to about a 90% decrease, about a 55% decrease to about a 85% decrease, about a 55% decrease to about a 80% decrease, about a 55% decrease to about a 75% decrease, about a 55% decrease to about a 70% decrease, about a 55% decrease to about a 65% decrease, about a 55% decrease to about a 60% decrease, about a 60% decrease to about a 99% decrease, about a 60% decrease to about a 95% decrease, about a 60% decrease to about a 90% decrease, about a 60% decrease to about a 85% decrease, about a 60% decrease to about a 80% decrease, about a 60% decrease to about a 75% decrease, about a 60% decrease to about a 70% decrease, about a 60% decrease to about a 65% decrease, about a 65% decrease to about a 99% decrease, about a 65% decrease to about a 95% decrease, about a 65% decrease to about a 90% decrease, about a 65% decrease to about a 85% decrease, about a 65% decrease to about a 80% decrease, about a 65% decrease to about a 75% decrease, about a 65% decrease to about a 70% decrease, about a 70% decrease to about a 99% decrease, about a 70% decrease to about a 95% decrease, about a 70% decrease to about a 90% decrease, about a 70% decrease to about a 85% decrease, about a 70% decrease to about a 80% decrease, about a 70% decrease to about a 75% decrease, about a 75% decrease to about a 99% decrease, about a 75% decrease to about a 95% decrease, about a 75% decrease to about a 90% decrease, about a 75% decrease to about a 85% decrease, about a 75% decrease to about a 80% decrease, about a 80% decrease to about a 99% decrease, about a 80% decrease to about a 95% decrease, about a 80% decrease to about a 90% decrease, about a 80% decrease to about a 85% decrease, about a 85% decrease to about a 99% decrease, about a 85% decrease to about a 95% decrease, about a 85% decrease to about a 90% decrease, about a 90% decrease to about a 99% decrease, about a 90% decrease to about a 95% decrease, or about a 95% decrease to about a 99% decrease) as compared to the half-life of a control ABPC (e.g., any of the exemplary control ABPCs described herein).

### Conjugation

[0788] In some embodiments, the ABPCs provided herein can be conjugated to a drug (e.g., a chemotherapeutic drug, a small molecule), a toxin, or a radioisotope. Non-limiting examples of drugs, toxins, and radioisotopes (e.g., known to be useful for the treatment of cancer) are known in the art.

[0789] In some embodiments, at least one polypeptide of any of the ABPCs described herein is conjugated to the toxin, the radioisotope, or the drug via a cleavable linker. In some embodiments, the cleavable linker includes a protease cleavage site. In some embodiments, the cleavable linker is cleaved on the ABPC once it is transported to the lysosome or late endosome by the target mammalian cell. In some embodiments, cleavage of the linker functionally activates the drug or toxin.

[0790] In some embodiments, at least one polypeptide of any of the ABPCs described herein is conjugated to the toxin, the radioisotope, or the drug via a non-cleavable linker. In some embodiments, the conjugated toxin, radioisotope, or drug is released during lysosomal and/or late endosomal degradation of the ABPC.

[0791] Non-limiting examples of cleavable linkers include: hydrazone linkers, peptide linkers, disulfide linkers, and thioether linkers. See, e.g., Carter et al., Cancer J. 14(3):154-169, 2008; Sanderson et al., Clin. Cancer Res. 11(2 Pt1):843-852, 2005; Chari et al., Acc. Chem. Res. 41(1):98-107, 2008; Oflazoglu et al., Clin. Cancer Res. 14(19): 6171-6180, 2008; and Lu et al., Int. J. Mol. Sci. 17(4): 561, 2016.

[0792] Non-limiting examples of non-cleavable linkers include: maleimide alkane-linkers and maleimide cyclohexane linker (MMC) (see, e.g., those described in McCombs et al., AAPS J. 17(2):339-351, 2015).

[0793] In some embodiments, any of the ABPCs described herein is cytotoxic or cytostatic to the target mammalian cell.

### Expression of an Antigen-Binding Protein Construct in a Cell

[0794] Also provided herein are methods of generating a recombinant cell that expresses an ABPC (e.g., any of the ABPCs described herein) that include: introducing into a cell a nucleic acid encoding the ABPC to produce a recombinant cell; and culturing the recombinant cell under conditions sufficient for the expression of the ABPC. In some embodiments, the introducing step includes introducing into a cell an expression vector including a nucleic acid encoding the ABPC to produce a recombinant cell.

[0795] Any of the ABPCs described herein can be produced by any cell, e.g., a eukaryotic cell or a prokaryotic cell. As used herein, the term “eukaryotic cell” refers to a cell having a distinct, membrane-bound nucleus. Such cells may include, for example, mammalian (e.g., rodent, non-human primate, or human), insect, fungal, or plant cells. In some embodiments, the eukaryotic cell is a yeast cell, such as Saccharomyces cerevisiae. In some embodiments, the eukaryotic cell is a higher eukaryote, such as mammalian, avian, plant, or insect cells. As used herein, the term “prokaryotic cell” refers to a cell that does not have a distinct, membrane-bound nucleus. In some embodiments, the prokaryotic cell is a bacterial cell.

[0796] Methods of culturing cells are well known in the art. Cells can be maintained in vitro under conditions that favor proliferation, differentiation, and growth. Briefly, cells can be cultured by contacting a cell (e.g., any cell) with a cell culture medium that includes the necessary growth factors and supplements to support cell viability and growth.

[0797] Methods of introducing nucleic acids and expression vectors into a cell (e.g., a eukaryotic cell) are known in the art. Non-limiting examples of methods that can be used to introduce a nucleic acid into a cell include lipofection, transfection, electroporation, microinjection, calcium phosphate transfection, dendrimer-based transfection, cationic polymer transfection, cell squeezing, sonoporation, optical transfection, impalection, hydrodynamic delivery, magnetofection, viral transduction (e.g., adenoviral and lentiviral transduction), and nanoparticle transfection.

[0798] Provided herein are methods that further include isolation of the ABPCs from a cell (e.g., a eukaryotic cell) using techniques well-known in the art (e.g., ammonium sulfate precipitation, polyethylene glycol precipitation, ion-exchange chromatography (anion or cation), chromatography based on hydrophobic interaction, metal-affinity chromatography, ligand-affinity chromatography, and size exclusion chromatography).

### Methods of Treatment

[0799] Provided herein are methods of treating a cancer characterized by having a population of cancer cells that have MET or an epitope of MET presented on their surface, that include: administering a therapeutically effective amount of any of the pharmaceutical compositions described herein or any of the ABPCs described herein to a subject identified as having a cancer characterized by having the population of cancer cells.

[0800] Also provided herein are methods of reducing the volume of a tumor in a subject, wherein the tumor is characterized by having a population of cancer cells that have MET or an epitope of MET presented on their surface, that include: administering a therapeutically effective amount of any of the pharmaceutical compositions described herein or any of the ABPCs described herein to a subject identified as having a cancer characterized by having the population of cancer cells. In some embodiments of any of the methods described herein, the volume of at least one (e.g., 1, 2, 3, 4, or 5) tumor (e.g., solid tumor) or tumor location (e.g., a site of metastasis) is reduced (e.g., a detectable reduction) by at least 1%, at least 2%, at least 3%, at least 4%, at least 5%, at least 6%, at least 8%, at least 10%, at least 12%, at least 14%, at least 16%, at least 18%, at least 20%, at least 22%, at least 24%, at least 26%, at least 28%, at least 30%, at least 35%, at least 40%, at least 45%, at least 50%, at least 55%, at least 60%, at least 65%, at least 70%, at least 75%, at least 80%, at least 85%, at least 90%, at least 95%, or at least 99%) reduced as compared to the size of the at least one tumor (e.g., solid tumor) before administration of the ABPC.

[0801] Also provided herein are methods of inducing cell death in a cancer cell in a subject, wherein the cancer cell has MET or an epitope of MET presented on its surface, that include: administering a therapeutically effective amount of any of the pharmaceutical compositions of described herein or any of the ABPCs described herein to a subject identified as having a cancer characterized as having the population of cancer cells. In some embodiments, the cell death that is induced is necrosis. In some embodiments, the cell death that is induced is apoptosis.

[0802] In some embodiments of any of the methods described herein, the cancer is a primary tumor.

[0803] In some embodiments of any of the methods described herein, the cancer is a metastasis.

[0804] In some embodiments of any of the methods described herein, the cancer is a non-T-cell-infiltrating tumor. In some embodiments of any of the methods described herein, the cancer is a T-cell-infiltrating tumor.

[0805] Provided herein are methods of decreasing the risk of developing a metastasis or decreasing the risk of developing an additional metastasis in a subject having a cancer, wherein the cancer is characterized by having a population of cancer cells that have MET or an epitope of MET presented on their surface, that include: administering a therapeutically effective amount of any of the pharmaceutical compositions of described herein or any of the ABPCs described herein to a subject identified as having a cancer characterized as having the population of cancer cells. In some embodiments, the risk of developing a metastasis or the risk of developing an additional metastasis is decreased (e.g., a detectable decrease) by at least 1%, by at least 2%, at least 3%, at least 4%, at least 5%, at least 6%, at least 8%, at least 10%, at least 12%, at least 14%, at least 16%, at least 18%, at least 20%, at least 25%, at least 30%, at least 35%, at least 40%, at least 45%, at least 50%, at least 55%, at least 60%, at least 65%, at least 70%, at least 75%, at least 80%, at least 85%, at least 90%, at least 95%, or at least 99% in the subject as compared to the risk of a subject having a similar cancer, but administered no treatment or a treatment that does not include the administration of any of the ABPCs described herein.

[0806] In some embodiments of any of the methods described herein, the cancer is a non-T-cell-infiltrating tumor. In some embodiments of any of the methods described herein, the cancer is a T-cell-infiltrating tumor. In some embodiments of any of the methods described herein, the cellular compartment is part of the endosomal/lysosomal pathway. In some embodiments of any of the methods described herein, the cellular compartment is an endosome.

[0807] The term “subject” refers to any mammal. In some embodiments, the subject or “subject suitable for treatment” may be a canine (e.g., a dog), feline (e.g., a cat), equine (e.g., a horse), ovine, bovine, porcine, caprine, primate, e.g., a simian (e.g., a monkey (e.g., marmoset, baboon), or an ape (e.g., a gorilla, chimpanzee, orangutan, or gibbon) or a human; or rodent (e.g., a mouse, a guinea pig, a hamster, or a rat). In some embodiments, the subject or “subject suitable for treatment” may be a non-human mammal, especially mammals that are conventionally used as models for demonstrating therapeutic efficacy in humans (e.g., murine, lapine, porcine, canine or primate animals) may be employed.

[0808] As used herein, treating includes reducing the number, frequency, or severity of one or more (e.g., two, three, four, or five) signs or symptoms of a cancer in a patient having a cancer (e.g., any of the cancers described herein). For example, treatment can reducing cancer progression, reduce the severity of a cancer, or reduce the risk of re-occurrence of a cancer in a subject having the cancer.

[0809] Provided herein are methods of inhibiting the growth of a solid tumor in a subject (e.g., any of the subjects described herein) that include administering to the subject a therapeutically effective amount of any of the ABPCs described herein or any of the pharmaceutical compositions described herein (e.g., as compared to the growth of the solid tumor in the subject prior to treatment or the growth of a similar solid tumor in a different subject receiving a different treatment or receiving no treatment).

[0810] In some embodiments of any of the methods described herein, the growth of a solid tumor is primary growth of a solid tumor. In some embodiments of any of the methods described herein, the growth of a solid tumor is recurrent growth of a solid tumor. In some embodiments of any of the methods described herein, the growth of a solid tumor is metastatic growth of a solid tumor. In some embodiments, treatment results in about a 1% decrease to about 99% decrease (or any of the subranges of this range described herein) in the growth of a solid tumor in the subject (e.g., as compared to the growth of the solid tumor in the subject prior to treatment or the growth of a similar solid tumor in a different subject receiving a different treatment or receiving no treatment). The growth of a solid tumor in a subject can be assessed by a variety of different imaging methods, e.g., positron emission tomograph, X-ray computed tomography, computed axial tomography, and magnetic resonance imaging.

[0811] Also provided herein are methods of decreasing the risk of developing a metastasis or developing an additional metastasis over a period of time in a subject identified as having a cancer (e.g., any of the exemplary cancers described herein) that include administering to the subject a therapeutically effective amount of any of the proteins described herein or any of the pharmaceutical compositions described herein (e.g., as compared to a subject having a similar cancer and receiving a different treatment or receiving no treatment). In some embodiments of any of the methods described herein, the metastasis or additional metastasis is one or more to a bone, lymph nodes, brain, lung, liver, skin, chest wall including bone, cartilage and soft tissue, abdominal cavity, contralateral breast, soft tissue, muscle, bone marrow, ovaries, adrenal glands, and pancreas.

[0812] In some embodiments of any of the methods described herein, the period of time is about 1 month to about 3 years (e.g., about 1 month to about 2.5 years, about 1 month to about 2 years, about 2 months to about 1.5 years, about 1 month to about 1 year, about 1 month to about 10 months, about 1 month to about 8 months, about 1 month to about 6 months, about 1 month to about 5 months, about 1 month to about 4 months, about 1 month to about 3 months, about 1 month to about 2 months, about 2 months to about 3 years, about 2 months to about 2.5 years, about 2 months to about 2 years, about 2 months to about 1.5 years, about 2 months to about 1 year, about 2 months to about 10 months, about 2 months to about 8 months, about 2 months to about 6 months, about 2 months to about 5 months, about 2 months to about 4 months, about 2 months to about 3 months, about 3 months to about 3 years, about 3 months to about 2.5 years, about 3 months to about 2 years, about 3 months to about 1.5 years, about 3 months to about 1 year, about 3 months to about 10 months, about 3 months to about 8 months, about 3 months to about 6 months, about 3 months to about 5 months, about 3 months to about 4 months, about 4 months to about 3 years, about 4 months to about 2.5 years, about 4 months to about 2 years, about 4 months to about 1.5 years, about 4 months to about 1 year, about 4 months to about 10 months, about 4 months to about 8 months, about 4 months to about 6 months, about 4 months to about 5 months, about 5 months to about 3 years, about 5 months to about 2.5 years, about 5 months to about 2 years, about 5 months to about 1.5 years, about 5 months to about 1 year, about 5 months to about 10 months, about 5 months to about 8 months, about 5 months to about 6 months, about 6 months to about 3 years, about 6 months to about 2.5 years, about 6 months to about 2 years, about 6 months to about 1.5 years, about 6 months to about 1 year, about 6 months to about 10 months, about 6 months to about 8 months, about 8 months to about 3 years, about 8 months to about 2.5 years, about 8 months to about 2 years, about 8 months to about 1.5 years, about 8 months to about 1 year, about 8 months to about 10 months, about 10 months to about 3 years, about 10 months to about 2.5 years, about 10 months to about 2 years, about 10 months to about 1.5 years, about 10 months to about 1 year, about 1 year to about 3 years, about 1 year to about 2.5 years, about 1 year to about 2 years, about 1 year to about 1.5 years, about 1.5 years to about 3 years, about 1.5 years to about 2.5 years, about 1.5 years to about 2 years, about 2 years to about 3 years, about 2 years to about 2.5 years, or about 2.5 years to about 3 years).

[0813] In some embodiments, the risk of developing a metastasis or developing an additional metastasis over a period of time in a subject identified as having a cancer is decreased by about 1% to about 99% (e.g., or any of the subranges of this range described herein), e.g., as compared to the risk in a subject having a similar cancer receiving a different treatment or receiving no treatment.

[0814] Non-limiting examples of cancer include: acute lymphoblastic, leukemia (ALL), acute myeloid leukemia (AML), adrenocortical carcinoma, anal cancer, appendix cancer, astrocytoma, basal cell carcinoma, brain tumor, bile duct cancer, bladder cancer, bone cancer, breast cancer, bronchial tumor, Burkitt Lymphoma, carcinoma of unknown primary origin, cardiac tumor, cervical cancer, chordoma, chronic lymphocytic leukemia (CLL), chronic myelogenous leukemia (CML), chronic myeloproliferative neoplasm, colon cancer, colorectal cancer, craniopharyngioma, cutaneous T-cell lymphoma, ductal carcinoma, embryonal tumor, endometrial cancer, ependymoma, esophageal cancer, esthesioneuroblastoma, fibrous histiocytoma, Ewing sarcoma, eye cancer, germ cell tumor, gallbladder cancer, gastric cancer, gastrointestinal carcinoid tumor, gastrointestinal stromal tumor, gestational trophoblastic disease, glioma, head and neck cancer, hairy cell leukemia, hepatocellular cancer, histiocytosis, Hodgkin lymphoma, hypopharyngeal cancer, intraocular melanoma, islet cell tumor, Kaposi sarcoma, kidney cancer, Langerhans cell histiocytosis, laryngeal cancer, leukemia, lip and oral cavity cancer, liver cancer, lobular carcinoma in situ, lung cancer, lymphoma, macroglobulinemia, malignant fibrous histiocytoma, melanoma, Merkel cell carcinoma, mesothelioma, metastatic squamous neck cancer with occult primary, midline tract carcinoma involving NUT gene, mouth cancer, multiple endocrine neoplasia syndrome, multiple myeloma, mycosis fungoides, myelodysplastic syndrome, myelodysplastic/myeloproliferative neoplasm, nasal cavity and para-nasal sinus cancer, nasopharyngeal cancer, neuroblastoma, non-Hodgkin lymphoma, non-small cell lung cancer, oropharyngeal cancer, osteosarcoma, ovarian cancer, pancreatic cancer, papillomatosis, paraganglioma, parathyroid cancer, penile cancer, pharyngeal cancer, pheochromocytomas, pituitary tumor, pleuropulmonary blastoma, primary central nervous system lymphoma, prostate cancer, rectal cancer, renal cell cancer, renal pelvis and ureter cancer, retinoblastoma, rhabdoid tumor, salivary gland cancer, Sezary syndrome, skin cancer, small cell lung cancer, small intestine cancer, soft tissue sarcoma, spinal cord tumor, stomach cancer, T-cell lymphoma, teratoid tumor, testicular cancer, throat cancer, thymoma and thymic carcinoma, thyroid cancer, urethral cancer, uterine cancer, vaginal cancer, vulvar cancer, and Wilms' tumor. Additional examples of cancer are known in the art.

[0815] In some embodiments, the patient is further administered one or more additional therapeutic agents (e.g., one or more of a chemotherapeutic agent, a recombinant cytokine or interleukin protein, a kinase inhibitor, and a checkpoint inhibitor). In some embodiments, the one or more additional therapeutic agents is administered to the patient at approximately the same time as any of the ABPCs described herein are administered to the patient. In some embodiments, the one or more additional therapeutic agents are administered to the patient after the administration of any of the ABPCs described herein to the patient. In some embodiments, the one or more additional therapeutic agents are administered to the patient before the administration of any of the ABPCs described herein to the patient.

[0816] In some embodiments of any of the methods described herein, the cancer is a solid cancer (e.g., breast cancer, prostate cancer, or non-small cell lung cancer).

### Compositions

[0817] Also provided herein are compositions (e.g., pharmaceutical compositions) that include at least one of any of the ABPCs described herein. In some embodiments, the compositions (e.g., pharmaceutical compositions) can be disposed in a sterile vial or a pre-loaded syringe.

[0818] In some embodiments, the compositions (e.g., pharmaceutical compositions) are formulated for different routes of administration (e.g., intravenous, subcutaneous, intramuscular, or intratumoral). In some embodiments, the compositions (e.g., pharmaceutical compositions) can include a pharmaceutically acceptable carrier (e.g., phosphate buffered saline). Single or multiple administrations of any of the pharmaceutical compositions described herein can be given to a subject depending on, for example: the dosage and frequency as required and tolerated by the patient. A dosage of the pharmaceutical composition should provide a sufficient quantity of the ABPC to effectively treat or ameliorate conditions, diseases, or symptoms.

[0819] Also provided herein are methods of treating a subject having a cancer (e.g., any of the cancers described herein) that include administering a therapeutically effective amount of at least one of any of the compositions or pharmaceutical compositions provided herein.

### Kits

[0820] Also provided herein are kits that include any of the ABPCs described herein, any of the compositions described herein, or any of the pharmaceutical compositions described herein. In some embodiments, the kits can include instructions for performing any of the methods described herein. In some embodiments, the kits can include at least one dose of any of the compositions (e.g., pharmaceutical compositions) described herein. In some embodiments, the kits can provide a syringe for administering any of the pharmaceutical compositions described herein.

### Protein Constructs

[0821] Also provided are protein constructs (PCs) that include: a first antigen-binding domain that is capable of specifically binding MET or an epitope of MET presented on the surface of a target mammalian cell, where: (a) the dissociation rate of the first antigen-binding domain at a pH of about 7.0 to about 8.0 (or any of the subranges of this range described herein) is faster than the dissociation rate at a pH of about 4.0 to about 6.5 (or any of the subranges of this range described herein); and/or (b) the dissociation constant (K_{D}) of the first antigen-binding domain at a pH of about 7.0 to about 8.0 (or any of the subranges of this range) is greater than the K_{D} at a pH of about 4.0 to about 6.5.

[0822] Also provided herein are pharmaceutical compositions including any of the PCs described herein. Also provided herein are methods of treating a subject in need thereof that include administering a therapeutically effective amount of any of the PCs described herein to the subject.

### Methods of Improving pH Dependence of an Antigen-Binding Protein Construct

[0823] Also provided herein are methods of improving pH dependence of an antigen-binding protein construct, the method comprises providing a starting antigen-binding protein construct comprising an antigen-binding domain and introducing one or more histidine amino acid substitutions into one or more CDRs of the antigen-binding domain in the starting antigen-binding protein construct, wherein the method results in the generation of an antigen-binding protein construct having one or both of: (a) an increased (e.g., at least a 0.1-fold increase to about a 100-fold increase, or any of the subranges of this range described herein) ratio of the dissociation rate of the antigen-binding domain at a pH of about 4.0 to about 6.5 to the dissociation rate at a pH of about 7.0 to about 8.0, as compared to the starting antigen-binding protein construct, and (b) an increased (e.g., at least a 0.1-fold increase to about a 100-fold increase, or any of the subranges of this range described herein) ratio the dissociation constant (K_{D}) of the antigen-binding domain at a pH of about 4.0 to about 6.5 to the K_{D} at a pH of about 7.0 to about 8.0, as compared to the starting antigen-binding protein construct.

### Embodiments

[0824] Embodiment 1 is a pharmaceutical composition comprising an effective amount of an antigen-binding protein construct (ABPC) comprising: a first antigen-binding domain that is capable of specifically binding MET or an epitope of MET presented on the surface of a target mammalian cell, wherein: (a) the dissociation rate of the first antigen-binding domain at a pH of about 4.0 to about 6.5 is faster than the dissociation rate at a pH of about 7.0 to about 8.0; or (b) the dissociation constant (K_{D}) of the first antigen-binding domain at a pH of about 4.0 to about 6.5 is greater than the K_{D} at a pH of about 7.0 to about 8.0.

[0825] Embodiment 2 is the pharmaceutical composition of embodiment 1, wherein the first antigen-binding domain comprises a heavy chain variable domain of Telisotuzumab with one or more amino acids substituted with a histidine.

[0826] Embodiment 3 is the pharmaceutical composition of embodiment 1, wherein the first antigen-binding domain comprises a light chain variable domain of Telisotuzumab with one or more amino acids substituted with a histidine.

[0827] Embodiment 4 is the pharmaceutical composition of embodiment 1, wherein the first antigen-binding domain comprises: a heavy chain variable domain of Telisotuzumab with one or more amino acids substituted with a histidine; and a light chain variable domain of Telisotuzumab with one or more amino acids substituted with a histidine.

[0828] Embodiment 5 is the pharmaceutical composition of embodiment 2 or 4, wherein the heavy chain variable domain of Telisotuzumab comprises SEQ ID NO: 1.

[0829] Embodiment 6 is the pharmaceutical composition of embodiment 3 or 4, wherein the light chain variable domain of Telisotuzumab comprises SEQ ID NO: 2.

[0830] Embodiment 7 is the pharmaceutical composition of embodiment 1, wherein the first antigen-binding domain comprises a heavy chain variable domain comprising a CDR1, a CDR2, and a CDR3 of SEQ ID NOs: 3-5, respectively, with collectively a total of one or more amino acid positions in SEQ ID NOs: 3-5 substituted with a histidine.

[0831] Embodiment 8 is the pharmaceutical composition of embodiment 1, wherein the first MET-binding domain comprises a light chain variable domain comprising a CDR1, a CDR2, and a CDR3 of SEQ ID NOs: 6-8, respectively, with collectively a total of one or more amino acid positions in SEQ ID NOs: 6-8 substituted with a histidine.

[0832] Embodiment 9 is the pharmaceutical composition of embodiment 1, wherein the first MET-binding domain comprises: a heavy chain variable domain comprising a CDR1, a CDR2, and a CDR3 of SEQ ID NOs: 3-5, respectively, with collectively a total of one or more amino acid positions in SEQ ID NOs: 3-5 substituted with a histidine; and a light chain variable domain comprising a CDR1, a CDR2, and a CDR3 of SEQ ID NOs: 6-8, respectively, with collectively a total of one or more amino acid positions in SEQ ID NOs: 6-8 substituted with a histidine.

[0833] Embodiment 10 is the pharmaceutical composition of embodiment 1, 2, or 7, wherein the first antigen-binding domain comprises a heavy chain variable domain that is at least 90% identical to SEQ ID NO: 1, wherein the heavy chain variable domain includes a histidine at one or more positions in SEQ ID NO: 1 selected from the group consisting of: 26, 27, 28, 29, 32, 97, 98, 99, 100, 101, 102, 103, and 107.

[0834] Embodiment 11 is the pharmaceutical composition of embodiment 1, 3, or 8, wherein the first antigen-binding domain comprises a light chain variable domain that is at least 90% identical to SEQ ID NO: 2, wherein the light chain variable domain includes a histidine at one or more positions in SEQ ID NO: 2.

[0835] Embodiment 12 is the pharmaceutical composition of embodiment 1, 4, or 9, wherein the first antigen-binding domain comprises: a heavy chain variable domain that is at least 90% identical to SEQ ID NO: 1, wherein the heavy chain variable domain includes a histidine at one or more positions in SEQ ID NO: 1 selected from the group consisting of: 26, 27, 28, 29, 32, 97, 98, 99, 100, 101, 102, 103, and 107; and a light chain variable domain that is at least 90% identical to SEQ ID NO: 2, wherein the light chain variable domain includes a histidine at one or more positions in SEQ ID NO: 2.

[0836] Embodiment 13 is the pharmaceutical composition of embodiment 1, wherein the first antigen-binding domain comprises a heavy chain variable domain of SEQ ID NO: 13, SEQ ID NO: 14, SEQ ID NO: 15, SEQ ID NO: 16, SEQ ID NO: 19, SEQ ID NO: 40, SEQ ID NO: 41, SEQ ID NO: 42, SEQ ID NO: 43, SEQ ID NO: 44, SEQ ID NO: 45, SEQ ID NO: 46, or SEQ ID NO: 50.

[0837] Embodiment 14 is the pharmaceutical composition of embodiment 13, wherein the first antigen-binding domain comprises a light chain variable domain of SEQ ID NO: 2.

[0838] Embodiment 15 is the pharmaceutical composition of any one of embodiments 1-14, wherein the ABPC is degraded in the target mammalian cell following internalization of the ABPC by the target mammalian cell.

[0839] Embodiment 16 is the pharmaceutical composition of any one of embodiments 1-15, wherein the ABPC further comprises a conjugated toxin, radioisotope, drug, or small molecule.

[0840] Embodiment 17 is the pharmaceutical composition of embodiment 16, wherein the composition provides for an increase in toxin liberation in the target mammalian cell as compared to a composition comprising the same amount of a control ABPC.

[0841] Embodiment 18 is the pharmaceutical composition of embodiment 17, wherein the composition provides for at least a 20% increase in toxin liberation in the target mammalian cell as compared to a composition comprising the same amount of a control ABPC.

[0842] Embodiment 19 is the pharmaceutical composition of embodiment 18, wherein the composition provides for at least a 50% increase in toxin liberation in the target mammalian cell as compared to a composition comprising the same amount of a control ABPC.

[0843] Embodiment 20 is the pharmaceutical composition of embodiment 17, wherein the composition provides for at least a 2-fold increase in toxin liberation in the target mammalian cell as compared to a composition comprising the same amount of a control ABPC.

[0844] Embodiment 21 is the pharmaceutical composition of embodiment 20, wherein the composition provides for at least a 5-fold increase in toxin liberation in the target mammalian cell as compared to a composition comprising the same amount of a control ABPC.

[0845] Embodiment 22 is the pharmaceutical composition of any one of embodiments 16-21, wherein the composition provides for an increase in target mammalian cell killing as compared to a composition comprising the same amount of a control ABPC.

[0846] Embodiment 23 is the pharmaceutical composition of embodiment 22, wherein the composition provides for at least a 20% increase in target mammalian cell killing as compared to a composition comprising the same amount of a control ABPC.

[0847] Embodiment 24 is the pharmaceutical composition of embodiment 23, wherein the composition provides for at least a 50% increase in target mammalian cell killing as compared to a composition comprising the same amount of a control ABPC.

[0848] Embodiment 25 is the pharmaceutical composition of embodiment 22, wherein the composition provides for at least a 2-fold increase in target mammalian cell killing as compared to a composition comprising the same amount of a control ABPC.

[0849] Embodiment 26 is the pharmaceutical composition of embodiment 25, wherein the composition provides for at least a 5-fold increase in target mammalian cell killing as compared to a composition comprising the same amount of a control ABPC.

[0850] Embodiment 27 is the pharmaceutical composition of any one of embodiments 1-26, wherein the composition provides for an increase in endolysosomal delivery in the target mammalian cell as compared to a composition comprising the same amount of a control ABPC.

[0851] Embodiment 28 is the pharmaceutical composition of embodiment 27, wherein the composition provides for at least a 20% increase in endolysosomal delivery in the target mammalian cell as compared to a composition comprising the same amount of a control ABPC.

[0852] Embodiment 29 is the pharmaceutical composition of embodiment 28, wherein the composition provides for at least a 50% increase in endolysosomal delivery in the target mammalian cell as compared to a composition comprising the same amount of a control ABPC.

[0853] Embodiment 30 is the pharmaceutical composition of embodiment 27, wherein the composition provides for at least a 2-fold increase in endolysosomal delivery in the target mammalian cell as compared to a composition comprising the same amount of a control ABPC.

[0854] Embodiment 31 is the pharmaceutical composition of embodiment 30, wherein the composition provides for at least a 5-fold increase in endolysosomal delivery in the target mammalian cell as compared to a composition comprising the same amount of a control ABPC.

[0855] Embodiment 32 is the pharmaceutical composition of any one of embodiments 1-31, wherein the composition results in a less of a reduction in the level of MET presented on the surface of the target mammalian cell as compared to a composition comprising the same amount of a control ABPC.

[0856] Embodiment 33 is the pharmaceutical composition of any one of embodiments 1-31, wherein the composition does not result in a detectable reduction in the level of the MET presented on the surface of the target mammalian cell.

[0857] Embodiment 34 is a pharmaceutical composition comprising an effective amount of an antigen-binding protein construct (ABPC) comprising: a first antigen-binding domain that is capable of specifically binding MET or an epitope of MET presented on the surface of a target mammalian cell; and a conjugated toxin, radioisotope, drug, or small molecule, wherein: (a) the dissociation rate of the first antigen-binding domain at a pH of about 4.0 to about 6.5 is faster than the dissociation rate at a pH of about 7.0 to about 8.0; or the dissociation constant (K_{D}) of the first antigen-binding domain at a pH of about 4.0 to about 6.5 is greater than the K_{D} at a pH of about 7.0 to about 8.0; and (b) the composition provides for one or more of: an increase in toxin liberation in the target mammalian cell as compared to a composition comprising the same amount of a control ABPC; an increase in target mammalian cell killing as compared to a composition comprising the same amount of a control ABPC; and an increase in endolysosomal delivery in the target mammalian cell as compared to a composition comprising the same amount of a control ABPC.

[0858] Embodiment 35 is the pharmaceutical composition of embodiment 34, wherein the first antigen-binding domain comprises a heavy chain variable domain of Telisotuzumab with one or more amino acids substituted with a histidine.

[0859] Embodiment 36 is the pharmaceutical composition of embodiment 34, wherein the first antigen-binding domain comprises a light chain variable domain of Telisotuzumab with one or more amino acids substituted with a histidine.

[0860] Embodiment 37 is the pharmaceutical composition of embodiment 34, wherein the first antigen-binding domain comprises: a heavy chain variable domain of Telisotuzumab with one or more amino acids substituted with a histidine; and a light chain variable domain of Telisotuzumab with one or more amino acids substituted with a histidine.

[0861] Embodiment 38 is the pharmaceutical composition of embodiment 35 or 37, wherein the heavy chain variable domain of Telisotuzumab comprises SEQ ID NO: 1.

[0862] Embodiment 39 is the pharmaceutical composition of embodiment 36 or 37, wherein the light chain variable domain of Telisotuzumab comprises SEQ ID NO: 2.

[0863] Embodiment 40 is the pharmaceutical composition of embodiment 34, wherein the first antigen-binding domain comprises a heavy chain variable domain comprising a CDR1, a CDR2, and a CDR3 of SEQ ID NOs: 3-5, respectively, with collectively a total of one or more amino acid positions in SEQ ID NOs: 3-5 substituted with a histidine.

[0864] Embodiment 41 is the pharmaceutical composition of embodiment 34, wherein the first MET-binding domain comprises a light chain variable domain comprising a CDR1, a CDR2, and a CDR3 of SEQ ID NOs: 6-8, respectively, with collectively a total of one or more amino acid positions in SEQ ID NOs: 6-8 substituted with a histidine.

[0865] Embodiment 42 is the pharmaceutical composition of embodiment 34, wherein the first MET-binding domain comprises: a heavy chain variable domain comprising a CDR1, a CDR2, and a CDR3 of SEQ ID NOs: 3-5, respectively, with collectively a total of one or more amino acid positions in SEQ ID NOs: 3-5 substituted with a histidine; and a light chain variable domain comprising a CDR1, a CDR2, and a CDR3 of SEQ ID NOs: 6-8, respectively, with collectively a total of one or more amino acid positions in SEQ ID NOs: 6-8 substituted with a histidine.

[0866] Embodiment 43 is the pharmaceutical composition of embodiment 34, 35, or 40, wherein the first antigen-binding domain comprises a heavy chain variable domain that is at least 90% identical to SEQ ID NO: 1, wherein the heavy chain variable domain includes a histidine at one or more positions in SEQ ID NO: 1 selected from the group consisting of: 26, 27, 28, 29, 32, 97, 98, 99, 100, 101, 102, 103, and 107.

[0867] Embodiment 44 is the pharmaceutical composition of embodiment 34, 36, or 41, wherein the first antigen-binding domain comprises a light chain variable domain that is at least 90% identical to SEQ ID NO: 2, wherein the light chain variable domain includes a histidine at one or more positions in SEQ ID NO: 2.

[0868] Embodiment 45 is the pharmaceutical composition of embodiment 34, 37, or 42, wherein the first antigen-binding domain comprises: a heavy chain variable domain that is at least 90% identical to SEQ ID NO: 1, wherein the heavy chain variable domain includes a histidine at one or more positions in SEQ ID NO: 1 selected from the group consisting of: 26, 27, 28, 29, 32, 97, 98, 99, 100, 101, 102, 103, and 107; and a light chain variable domain that is at least 90% identical to SEQ ID NO: 2, wherein the light chain variable domain includes a histidine at one or more positions in SEQ ID NO: 2.

[0869] Embodiment 46 is the pharmaceutical composition of embodiment 34, wherein the first antigen-binding domain comprises a heavy chain variable domain of SEQ ID NO: 13, SEQ ID NO: 14, SEQ ID NO: 15, SEQ ID NO: 16, SEQ ID NO: 19, SEQ ID NO: 40, SEQ ID NO: 41, SEQ ID NO: 42, SEQ ID NO: 43, SEQ ID NO: 44, SEQ ID NO: 45, SEQ ID NO: 46, or SEQ ID NO: 50.

[0870] Embodiment 47 is the pharmaceutical composition of embodiment 46, wherein the first antigen-binding domain comprises a light chain variable domain of SEQ ID NO: 2.

[0871] Embodiment 48 is the pharmaceutical composition of any one of embodiments 34-47, wherein the composition provides for an increase in toxin liberation in the target mammalian cell as compared to a composition comprising the same amount of a control ABPC.

[0872] Embodiment 49 is the pharmaceutical composition of embodiment 48, wherein the composition provides for at least a 20% increase in toxin liberation in the target mammalian cell as compared to a composition comprising the same amount of a control ABPC.

[0873] Embodiment 50 is the pharmaceutical composition of embodiment 49, wherein the composition provides for at least a 50% increase in toxin liberation in the target mammalian cell as compared to a composition comprising the same amount of a control ABPC.

[0874] Embodiment 51 is the pharmaceutical composition of embodiment 48, wherein the composition provides for at least a 2-fold increase in toxin liberation in the target mammalian cell as compared to a composition comprising the same amount of a control ABPC.

[0875] Embodiment 52 is the pharmaceutical composition of embodiment 51, wherein the composition provides for at least a 5-fold increase in toxin liberation in the target mammalian cell as compared to a composition comprising the same amount of a control ABPC.

[0876] Embodiment 53 is the pharmaceutical composition of any one of embodiments 34-52, wherein the composition provides for an increase in target mammalian cell killing as compared to a composition comprising the same amount of a control ABPC.

[0877] Embodiment 54 is the pharmaceutical composition of embodiment 53, wherein the composition provides for at least a 20% increase in target mammalian cell killing as compared to a composition comprising the same amount of a control ABPC.

[0878] Embodiment 55 is the pharmaceutical composition of embodiment 54, wherein the composition provides for at least a 50% increase in target mammalian cell killing as compared to a composition comprising the same amount of a control ABPC.

[0879] Embodiment 56 is the pharmaceutical composition of embodiment 53, wherein the composition provides for at least a 2-fold increase in target mammalian cell killing as compared to a composition comprising the same amount of a control ABPC.

[0880] Embodiment 57 is the pharmaceutical composition of embodiment 56, wherein the composition provides for at least a 5-fold increase in target mammalian cell killing as compared to a composition comprising the same amount of a control ABPC.

[0881] Embodiment 58 is the pharmaceutical composition of any one of embodiments 34-57, wherein the composition provides for an increase in endolysosomal delivery in the target mammalian cell as compared to a composition comprising the same amount of a control ABPC.

[0882] Embodiment 59 is the pharmaceutical composition of embodiment 58, wherein the composition provides for at least a 20% increase in endolysosomal delivery in the target mammalian cell as compared to a composition comprising the same amount of a control ABPC.

[0883] Embodiment 60 is the pharmaceutical composition of embodiment 59, wherein the composition provides for at least a 50% increase in endolysosomal delivery in the target mammalian cell as compared to a composition comprising the same amount of a control ABPC.

[0884] Embodiment 61 is the pharmaceutical composition of embodiment 58, wherein the composition provides for at least a 2-fold increase in endolysosomal delivery in the target mammalian cell as compared to a composition comprising the same amount of a control ABPC.

[0885] Embodiment 62 is the pharmaceutical composition of embodiment 61, wherein the composition provides for at least a 5-fold increase in endolysosomal delivery in the target mammalian cell as compared to a composition comprising the same amount of a control ABPC.

[0886] Embodiment 63 is the pharmaceutical composition of any one of embodiments 34-62, wherein the composition results in a less of a reduction in the level of MET presented on the surface of the target mammalian cell as compared to a composition comprising the same amount of a control ABPC.

[0887] Embodiment 64 is the pharmaceutical composition of any one of embodiments 34-62, wherein the composition does not result in a detectable reduction in the level of the MET presented on the surface of the target mammalian cell.

[0888] Embodiment 65 is the pharmaceutical composition of any one of embodiments 1-64, wherein the target mammalian cell is a cancer cell.

[0889] Embodiment 66 is the pharmaceutical composition of any one of embodiments 1-65, wherein the dissociation rate of the antigen-binding domain at a pH of about 4.0 to about 6.5 is at least 10% faster than the dissociation rate of the antigen-binding domain at a pH of about 7.0 to about 8.0.

[0890] Embodiment 67 is the pharmaceutical composition of any one of embodiments 1-65, wherein the dissociation rate of the antigen-binding domain at a pH of about 4.0 to about 6.5 is at least 3-fold faster than the dissociation rate of the antigen-binding domain at a pH of about 7.0 to about 8.0.

[0891] Embodiment 68 is the pharmaceutical composition of any one of embodiments 1-65, wherein the dissociation rate of the antigen-binding domain at a pH of about 4.0 to about 6.5 is at least 10-fold faster than the dissociation rate of the antigen-binding domain at a pH of about 7.0 to about 8.0.

[0892] Embodiment 69 is the pharmaceutical composition of any one of embodiments 1-68, wherein the K_{D} of the antigen-binding domain at a pH of about 4.0 to about 6.5 is at least 10% greater than the K_{D} of the antigen-binding domain at a pH of about 7.0 to about 8.0.

[0893] Embodiment 70. The pharmaceutical composition of any one of embodiments 1-68, wherein the K_{D} of the antigen-binding domain at a pH of about 4.0 to about 6.5 is at least 3-fold greater than the K_{D} of the antigen-binding domain at a pH of about 7.0 to about 8.0.

[0894] Embodiment 71 is the pharmaceutical composition of any one of embodiments 1-68, wherein the K_{D} of the antigen-binding domain at a pH of about 4.0 to about 6.5 is at least 10-fold greater than the K_{D} of the antigen-binding domain at a pH of about 7.0 to about 8.0.

[0895] Embodiment 72 is the pharmaceutical composition of any one of embodiments 1-71, wherein the ABPC is cytotoxic or cytostatic to the target mammalian cell.

[0896] Embodiment 73 is the pharmaceutical composition of any one of embodiments 1-72, wherein the ABPC is cross-reactive with a non-human primate MET and human MET.

[0897] Embodiment 74 is the pharmaceutical composition of any one of embodiments 1-72, wherein the ABPC is cross-reactive with a non-human primate MET, a human MET, and one or both of rat MET and a mouse MET.

[0898] Embodiment 75 is the pharmaceutical composition of embodiment 74, wherein the ABPC is cross-reactive with a non-human primate MET, a human MET, a rat MET, and a mouse MET.

[0899] Embodiment 76 is the pharmaceutical composition of any one of embodiments 1-75, wherein the antigen-binding domain binds to an epitope of MET that is present on the surface of cells from an Old World Monkey.

[0900] Embodiment 77 is the pharmaceutical composition of any one of embodiments 1-76, wherein the ABPC comprises a single polypeptide.

[0901] Embodiment 78 is the pharmaceutical composition of embodiment 77, wherein the antigen-binding domain is selected from the group consisting of: a VH domain, a VHH domain, a VNAR domain, and a scFv.

[0902] Embodiment 79 is the pharmaceutical composition of embodiment 77 or 78, wherein the ABPC is a BiTe, a (scFv)₂, a nanobody, a nanobody-HSA, a DART, a TandAb, a scDiabody, a scDiabody-CH3, scFv-CH-CL-scFv, a HSAbody, scDiabody-HSA, or a tandem-scFv.

[0903] Embodiment 80 is the pharmaceutical composition of any one of embodiments 1-76, wherein the ABPC comprises two or more polypeptides.

[0904] Embodiment 81 is the pharmaceutical composition of embodiment 80, wherein the ABPC is selected from the group of an antibody, a VHH-scAb, a VHH-Fab, a Dual scFab, a F(ab′)2, a diabody, a crossMab, a DAF (two-in-one), a DAF (four-in-one), a DutaMab, a DT-IgG, a knobs-in-holes common light chain, a knobs-in-holes assembly, a charge pair, a Fab-arm exchange, a SEEDbody, a LUZ-Y, a Fcab, a κλ-body, an orthogonal Fab, a DVD-IgG, a IgG(H)-scFv, a scFv-(H)IgG, IgG(L)-scFv, scFv-(L)IgG, IgG(L,H)-Fv, IgG(H)-V, V(H)-IgG, IgG(L)-V, V(L)-IgG, KIH IgG-scFab, 2scFv-IgG, IgG-2scFv, scFv4-Ig, Zybody, DVI-IgG, Diabody-CH3, a triple body, a miniantibody, a minibody, a TriBi minibody, scFv-CH3 KIH, Fab-scFv, a F(ab′)₂-scFv₂, a scFv-KIH, a Fab-scFv-Fc, a tetravalent HCAb, a scDiabody-Fc, a Diabody-Fc, a tandem scFv-Fc, a VHH-Fc, a tandem VHH-Fc, a VHH-Fc KiH, a Fab-VHH-Fc, an Intrabody, a dock and lock, an ImmTAC, an IgG-IgG conjugate, a Cov-X-Body, a scFv1-PEG-scFv2, an Adnectin, a DARPin, a fibronectin, and a DEP conjugate.

[0905] Embodiment 82 is the pharmaceutical composition of any one of embodiments 16-81, wherein at least one polypeptide of the ABPC is conjugated to the toxin, the radioisotope, the drug, or the small molecule via a cleavable linker.

[0906] Embodiment 83 is the pharmaceutical composition of any one of embodiments 16-81, wherein at least one polypeptide of the ABPC is conjugated to the toxin, the radioisotope, the drug, or the small molecule via a non-cleavable linker.

[0907] Embodiment 84 is the pharmaceutical composition of any of embodiments 1-83, wherein the half-life of the ABPC in vivo is decreased as compared to the half-life of a control ABPC in vivo.

[0908] Embodiment 85 is the pharmaceutical composition of embodiment 84, wherein the half-life of the ABPC in vivo is decreased about 5% to about 95% as compared to the half-life of a control ABPC in vivo.

[0909] Embodiment 86 is the pharmaceutical composition of embodiment 84, wherein the half-life of the ABPC in vivo is decreased about 10% to about 95% as compared to the half-life of a control ABPC in vivo.

[0910] Embodiment 87 is the pharmaceutical composition of embodiment 84, wherein the half-life of the ABPC in vivo is decreased about 30% to about 95% as compared to the half-life of a control ABPC in vivo.

[0911] Embodiment 88 is the pharmaceutical composition of embodiment 84, wherein the half-life of the ABPC in vivo is decreased about 50% to about 95% as compared to the half-life of a control ABPC in vivo.

[0912] Embodiment 89 is the pharmaceutical composition of embodiment 84, wherein the half-life of the ABPC in vivo is decreased about 70% to about 95% as compared to the half-life of a control ABPC in vivo.

[0913] Embodiment 90 is the pharmaceutical composition of any one of embodiments 17-89, wherein the control ABPC is capable of specifically binding to MET or an epitope of MET presented on the surface of a target mammalian cell, wherein: (a) the control ABPC comprises a first antigen-binding domain: (b) the dissociation rate of the first antigen-binding domain of the control ABPC at a pH of about 4.0 to about 6.5 is no more than 3-fold faster than the dissociation rate at a pH of about 7.0 to about 8.0; and (c) the dissociation constant (K_{D}) of the first antigen-binding domain of the control ABPC at a pH of about 4.0 to about 6.5 is no more than 3-fold greater than the K_{D} at a pH of about 7.0 to about 8.0.

[0914] Embodiment 91 is the pharmaceutical composition of any one of embodiments 17-89, wherein the control ABPC is capable of specifically binding to MET or an epitope of MET presented on the surface of a target mammalian cell, wherein: (a) the control ABPC comprises a first antigen-binding domain; (b) the dissociation rate of the first antigen-binding domain of the control ABPC at a pH of about 4.0 to about 6.5 is no more than 2-fold faster than the dissociation rate at a pH of about 7.0 to about 8.0; and (c) the dissociation constant (K_{D}) of the first antigen-binding domain of the control ABPC at a pH of about 4.0 to about 6.5 is no more than 2-fold greater than the K_{D} at a pH of about 7.0 to about 8.0.

[0915] Embodiment 92 is the pharmaceutical composition of any one of embodiments 17-89, wherein the control ABPC is capable of specifically binding to MET or an epitope of MET presented on the surface of a target mammalian cell, wherein: (a) the control ABPC comprises a first antigen-binding domain; (b) the dissociation rate of the first antigen-binding domain of the control ABPC at a pH of about 4.0 to about 6.5 is no more than 1-fold faster than the dissociation rate at a pH of about 7.0 to about 8.0; and (c) the dissociation constant (K_{D}) of the first antigen-binding domain of the control ABPC at a pH of about 4.0 to about 6.5 is no more than 1-fold greater than the K_{D} at a pH of about 7.0 to about 8.0.

[0916] Embodiment 93 is the pharmaceutical composition of any one of embodiments 17-89, wherein the control ABPC is Telisotuzumab.

[0917] Embodiment 94 is the pharmaceutical composition of any one of embodiments 1-93, wherein the ABPC further comprises a second antigen-binding domain.

[0918] Embodiment 95 is a kit comprising at least one dose of the pharmaceutical composition of any one of embodiments 1-94.

[0919] Embodiment 96 is an antigen-binding protein construct (ABPC) comprising: a first antigen-binding domain that is capable of specifically binding MET or an epitope of MET presented on the surface of a target mammalian cell, wherein: (a) the dissociation rate of the first antigen-binding domain at a pH of about 4.0 to about 6.5 is faster than the dissociation rate at a pH of about 7.0 to about 8.0; or (b) the dissociation constant (K_{D}) of the first antigen-binding domain at a pH of about 4.0 to about 6.5 is greater than the K_{D} at a pH of about 7.0 to about 8.0.

[0920] Embodiment 97 is the ABPC of embodiment 96, wherein the first antigen-binding domain comprises a heavy chain variable domain of Telisotuzumab with one or more amino acids substituted with a histidine.

[0921] Embodiment 98 is the ABPC of embodiment 96, wherein the first antigen-binding domain comprises a light chain variable domain of Telisotuzumab with one or more amino acids substituted with a histidine.

[0922] Embodiment 99 is the ABPC of embodiment 96, wherein the first antigen-binding domain comprises: a heavy chain variable domain of Telisotuzumab with one or more amino acids substituted with a histidine; and a light chain variable domain of Telisotuzumab with one or more amino acids substituted with a histidine.

[0923] Embodiment 100 is the ABPC of embodiment 97 or 99, wherein the heavy chain variable domain of Telisotuzumab comprises SEQ ID NO: 1.

[0924] Embodiment 101 is the ABPC of embodiment 98 or 99, wherein the light chain variable domain of Telisotuzumab comprises SEQ ID NO: 2.

[0925] Embodiment 102 is the ABPC of embodiment 96, wherein the first antigen-binding domain comprises a heavy chain variable domain comprising a CDR1, a CDR2, and a CDR3 of SEQ ID NOs: 3-5, respectively, with collectively a total of one or more amino acid positions in SEQ ID NOs: 3-5 substituted with a histidine.

[0926] Embodiment 103 is the ABPC of embodiment 96, wherein the first MET-binding domain comprises a light chain variable domain comprising a CDR1, a CDR2, and a CDR3 of SEQ ID NOs: 6-8, respectively, with collectively a total of one or more amino acid positions in SEQ ID NOs: 6-8 substituted with a histidine.

[0927] Embodiment 104 is the ABPC of embodiment 96, wherein the first MET-binding domain comprises: a heavy chain variable domain comprising a CDR1, a CDR2, and a CDR3 of SEQ ID NOs: 3-5, respectively, with collectively a total of one or more amino acid positions in SEQ ID NOs: 3-5 substituted with a histidine; and a light chain variable domain comprising a CDR1, a CDR2, and a CDR3 of SEQ ID NOs: 6-8, respectively, with collectively a total of one or more amino acid positions in SEQ ID NOs: 6-8 substituted with a histidine.

[0928] Embodiment 105 is the ABPC of embodiment 96, 97, or 102, wherein the first antigen-binding domain comprises a heavy chain variable domain that is at least 90% identical to SEQ ID NO: 1, wherein the heavy chain variable domain includes a histidine at one or more positions in SEQ ID NO: 1 selected from the group consisting of: 26, 27, 28, 29, 32, 97, 98, 99, 100, 101, 102, 103, and 107.

[0929] Embodiment 106 is the ABPC of embodiment 96, 98, or 103, wherein the first antigen-binding domain comprises a light chain variable domain that is at least 90% identical to SEQ ID NO: 2, wherein the light chain variable domain includes a histidine at one or more positions in SEQ ID NO: 2.

[0930] Embodiment 107 is the ABPC of embodiment 96, 99, or 104, wherein the first antigen-binding domain comprises: a heavy chain variable domain that is at least 90% identical to SEQ ID NO: 1, wherein the heavy chain variable domain includes a histidine at one or more positions in SEQ ID NO: 1 selected from the group consisting of: 26, 27, 28, 29, 32, 97, 98, 99, 100, 101, 102, 103, and 107; and a light chain variable domain that is at least 90% identical to SEQ ID NO: 2, wherein the light chain variable domain includes a histidine at one or more positions in SEQ ID NO: 2.

[0931] Embodiment 108 is the ABPC of embodiment 96, wherein the first antigen-binding domain comprises a heavy chain variable domain of SEQ ID NO: 13, SEQ ID NO: 14, SEQ ID NO: 15, SEQ ID NO: 16, SEQ ID NO: 19, SEQ ID NO: 40, SEQ ID NO: 41, SEQ ID NO: 42, SEQ ID NO: 43, SEQ ID NO: 44, SEQ ID NO: 45, SEQ ID NO: 46, or SEQ ID NO: 50.

[0932] Embodiment 109 is the ABPC of embodiment 108, wherein the first antigen-binding domain comprises a light chain variable domain of SEQ ID NO: 2.

[0933] Embodiment 110 is the ABPC of any one of embodiments 96-109, wherein the ABPC is degraded in the target mammalian cell following internalization of the ABPC by the target mammalian cell.

[0934] Embodiment 111 is the ABPC of any one of embodiments 96-110, wherein the ABPC further comprises a conjugated toxin, radioisotope, drug, or small molecule.

[0935] Embodiment 112 is the ABPC of embodiment 111, wherein a composition comprising the ABPC provides for an increase in toxin liberation in the target mammalian cell as compared to a composition comprising the same amount of a control ABPC.

[0936] Embodiment 113 is the ABPC of embodiment 112, wherein a composition comprising the ABPC provides for at least a 20% increase in toxin liberation in the target mammalian cell as compared to a composition comprising the same amount of a control ABPC.

[0937] Embodiment 114 is the ABPC of embodiment 113, wherein a composition comprising the ABPC provides for at least a 50% increase in toxin liberation in the target mammalian cell as compared to a composition comprising the same amount of a control ABPC.

[0938] Embodiment 115 is the ABPC of embodiment 112, wherein a composition comprising the ABPC provides for at least a 2-fold increase in toxin liberation in the target mammalian cell as compared to a composition comprising the same amount of a control ABPC.

[0939] Embodiment 116 is the ABPC of embodiment 115, wherein a composition comprising the ABPC provides for at least a 5-fold increase in toxin liberation in the target mammalian cell as compared to a composition comprising the same amount of a control ABPC.

[0940] Embodiment 117 is the ABPC of any one of embodiments 111-116, wherein a composition comprising the ABPC provides for an increase in target mammalian cell killing as compared to a composition comprising the same amount of a control ABPC.

[0941] Embodiment 118 is the ABPC of embodiment 117, wherein a composition comprising the ABPC provides for at least a 20% increase in target mammalian cell killing as compared to a composition comprising the same amount of a control ABPC.

[0942] Embodiment 119 is the ABPC of embodiment 118, wherein a composition comprising the ABPC provides for at least a 50% increase in target mammalian cell killing as compared to a composition comprising the same amount of a control ABPC.

[0943] Embodiment 120 is the ABPC of embodiment 117, wherein a composition comprising the ABPC provides for at least a 2-fold increase in target mammalian cell killing as compared to a composition comprising the same amount of a control ABPC.

[0944] Embodiment 121 is the ABPC of embodiment 120, wherein a composition comprising the ABPC provides for at least a 5-fold increase in target mammalian cell killing as compared to a composition comprising the same amount of a control ABPC.

[0945] Embodiment 122 is the ABPC of any one of embodiments 96-121, wherein a composition comprising the ABPC provides for an increase in endolysosomal delivery in the target mammalian cell as compared to a composition comprising the same amount of a control ABPC.

[0946] Embodiment 123 is the ABPC of embodiment 122, wherein a composition comprising the ABPC provides for at least a 20% increase in endolysosomal delivery in the target mammalian cell as compared to a composition comprising the same amount of a control ABPC.

[0947] Embodiment 124 is the ABPC of embodiment 123, wherein a composition comprising the ABPC provides for at least a 50% increase in endolysosomal delivery in the target mammalian cell as compared to a composition comprising the same amount of a control ABPC.

[0948] Embodiment 125 is the ABPC of embodiment 122, wherein a composition comprising the ABPC provides for at least a 2-fold increase in endolysosomal delivery in the target mammalian cell as compared to a composition comprising the same amount of a control ABPC.

[0949] Embodiment 126 is the ABPC of embodiment 125, wherein a composition comprising the ABPC provides for at least a 5-fold increase in endolysosomal delivery in the target mammalian cell as compared to a composition comprising the same amount of a control ABPC.

[0950] Embodiment 127 is the ABPC of any one of embodiments 96-126, wherein a composition comprising the ABPC results in a less of a reduction in the level of MET presented on the surface of the target mammalian cell as compared to a composition comprising the same amount of a control ABPC.

[0951] Embodiment 128 is the ABPC of any one of embodiments 96-126, wherein a composition comprising the ABPC does not result in a detectable reduction in the level of the MET presented on the surface of the target mammalian cell.

[0952] Embodiment 129 an antigen-binding protein construct (ABPC) comprising: a first antigen-binding domain that is capable of specifically binding MET or an epitope of MET presented on the surface of a target mammalian cell; and a conjugated toxin, radioisotope, drug, or small molecule, wherein: (a) the dissociation rate of the first antigen-binding domain at a pH of about 4.0 to about 6.5 is faster than the dissociation rate at a pH of about 7.0 to about 8.0; or the dissociation constant (K_{D}) of the first antigen-binding domain at a pH of about 4.0 to about 6.5 is greater than the K_{D} at a pH of about 7.0 to about 8.0; and (b) the composition provides for one or more of: an increase in toxin liberation in the target mammalian cell as compared to a composition comprising the same amount of a control ABPC; an increase in target mammalian cell killing as compared to a composition comprising the same amount of a control ABPC; and an increase in endolysosomal delivery in the target mammalian cell as compared to a composition comprising the same amount of a control ABPC.

[0953] Embodiment 130 is the ABPC of embodiment 129, wherein the first antigen-binding domain comprises a heavy chain variable domain of Telisotuzumab with one or more amino acids substituted with a histidine.

[0954] Embodiment 131 is the ABPC of embodiment 129, wherein the first antigen-binding domain comprises a light chain variable domain of Telisotuzumab with one or more amino acids substituted with a histidine.

[0955] Embodiment 132. The ABPC of embodiment 129, wherein the first antigen-binding domain comprises: a heavy chain variable domain of Telisotuzumab with one or more amino acids substituted with a histidine; and a light chain variable domain of Telisotuzumab with one or more amino acids substituted with a histidine.

[0956] Embodiment 133 is the ABPC of embodiment 130 or 132, wherein the heavy chain variable domain of Telisotuzumab comprises SEQ ID NO: 1.

[0957] Embodiment 134 is the ABPC of embodiment 131 or 132, wherein the light chain variable domain of Telisotuzumab comprises SEQ ID NO: 2.

[0958] Embodiment 135 is the ABPC of embodiment 129, wherein the first antigen-binding domain comprises a heavy chain variable domain comprising a CDR1, a CDR2, and a CDR3 of SEQ ID NOs: 3-5, respectively, with collectively a total of one or more amino acid positions in SEQ ID NOs: 3-5 substituted with a histidine.

[0959] Embodiment 136 is the ABPC of embodiment 129, wherein the first MET-binding domain comprises a light chain variable domain comprising a CDR1, a CDR2, and a CDR3 of SEQ ID NOs: 6-8, respectively, with collectively a total of one or more amino acid positions in SEQ ID NOs: 6-8 substituted with a histidine.

[0960] Embodiment 137 is the ABPC of embodiment 129, wherein the first MET-binding domain comprises: a heavy chain variable domain comprising a CDR1, a CDR2, and a CDR3 of SEQ ID NOs: 3-5, respectively, with collectively a total of one or more amino acid positions in SEQ ID NOs: 3-5 substituted with a histidine; and a light chain variable domain comprising a CDR1, a CDR2, and a CDR3 of SEQ ID NOs: 6-8, respectively, with collectively a total of one or more amino acid positions in SEQ ID NOs: 6-8 substituted with a histidine.

[0961] Embodiment 138 is the ABPC of embodiment 129, 130, or 135, wherein the first antigen-binding domain comprises a heavy chain variable domain that is at least 90% identical to SEQ ID NO: 1, wherein the heavy chain variable domain includes a histidine at one or more positions in SEQ ID NO: 1 selected from the group consisting of: 26, 27, 28, 29, 32, 97, 98, 99, 100, 101, 102, 103, and 107.

[0962] Embodiment 139 is the ABPC of embodiment 129, 131, or 136, wherein the first antigen-binding domain comprises a light chain variable domain that is at least 90% identical to SEQ ID NO: 2, wherein the light chain variable domain includes a histidine at one or more positions in SEQ ID NO: 2.

[0963] Embodiment 140 is the ABPC of embodiment 129, 132, or 137, wherein the first antigen-binding domain comprises: a heavy chain variable domain that is at least 90% identical to SEQ ID NO: 1, wherein the heavy chain variable domain includes a histidine at one or more positions in SEQ ID NO: 1 selected from the group consisting of: 26, 27, 28, 29, 32, 97, 98, 99, 100, 101, 102, 103, and 107; and a light chain variable domain that is at least 90% identical to SEQ ID NO: 2, wherein the light chain variable domain includes a histidine at one or more positions in SEQ ID NO: 2.

[0964] Embodiment 141 is the ABPC of embodiment 129, wherein the first antigen-binding domain comprises a heavy chain variable domain of SEQ ID NO: 13, SEQ ID NO: 14, SEQ ID NO: 15, SEQ ID NO: 16, SEQ ID NO: 19, SEQ ID NO: 40, SEQ ID NO: 41, SEQ ID NO: 42, SEQ ID NO: 43, SEQ ID NO: 44, SEQ ID NO: 45, SEQ ID NO: 46, or SEQ ID NO: 50.

[0965] Embodiment 142 is the ABPC of embodiment 141, wherein the first antigen-binding domain comprises a light chain variable domain of SEQ ID NO: 2.

[0966] Embodiment 143 is the ABPC of any one of embodiments 129-142, wherein a composition comprising the ABPC provides for an increase in toxin liberation in the target mammalian cell as compared to a composition comprising the same amount of a control ABPC.

[0967] Embodiment 144 is the ABPC of embodiment 143, wherein a composition comprising the ABPC provides for at least a 20% increase in toxin liberation in the target mammalian cell as compared to a composition comprising the same amount of a control ABPC.

[0968] Embodiment 145 is the ABPC of embodiment 144, wherein a composition comprising the ABPC provides for at least a 50% increase in toxin liberation in the target mammalian cell as compared to a composition comprising the same amount of a control ABPC.

[0969] Embodiment 146 is the ABPC of embodiment 143, wherein a composition comprising the ABPC provides for at least a 2-fold increase in toxin liberation in the target mammalian cell as compared to a composition comprising the same amount of a control ABPC.

[0970] Embodiment 147 is the ABPC of embodiment 146, wherein a composition comprising the ABPC provides for at least a 5-fold increase in toxin liberation in the target mammalian cell as compared to a composition comprising the same amount of a control ABPC.

[0971] Embodiment 148 is the ABPC of any one of embodiments 129-147, wherein a composition comprising the ABPC provides for an increase in target mammalian cell killing as compared to a composition comprising the same amount of a control ABPC.

[0972] Embodiment 149 is the ABPC of embodiment 148, wherein a composition comprising the ABPC provides for at least a 20% increase in target mammalian cell killing as compared to a composition comprising the same amount of a control ABPC.

[0973] Embodiment 150 is the ABPC of embodiment 149, wherein a composition comprising the ABPC provides for at least a 50% increase in target mammalian cell killing as compared to a composition comprising the same amount of a control ABPC.

[0974] Embodiment 151 is the ABPC of embodiment 148, wherein a composition comprising the ABPC provides for at least a 2-fold increase in target mammalian cell killing as compared to a composition comprising the same amount of a control ABPC.

[0975] Embodiment 152 is the ABPC of embodiment 151, wherein a composition comprising the ABPC provides for at least a 5-fold increase in target mammalian cell killing as compared to a composition comprising the same amount of a control ABPC.

[0976] Embodiment 153 is the ABPC of any one of embodiments 129-152, wherein a composition comprising the ABPC provides for an increase in endolysosomal delivery in the target mammalian cell as compared to a composition comprising the same amount of a control ABPC.

[0977] Embodiment 154 is the ABPC of embodiment 153, wherein a composition comprising the ABPC provides for at least a 20% increase in endolysosomal delivery in the target mammalian cell as compared to a composition comprising the same amount of a control ABPC.

[0978] Embodiment 155 is the ABPC of embodiment 154, wherein a composition comprising the ABPC provides for at least a 50% increase in endolysosomal delivery in the target mammalian cell as compared to a composition comprising the same amount of a control ABPC.

[0979] Embodiment 156 is the ABPC of embodiment 153, wherein a composition comprising the ABPC provides for at least a 2-fold increase in endolysosomal delivery in the target mammalian cell as compared to a composition comprising the same amount of a control ABPC.

[0980] Embodiment 157 is the ABPC of embodiment 156, wherein a composition comprising the ABPC provides for at least a 5-fold increase in endolysosomal delivery in the target mammalian cell as compared to a composition comprising the same amount of a control ABPC.

[0981] Embodiment 158 is the ABPC of any one of embodiments 129-157, wherein a composition comprising the ABPC results in a less of a reduction in the level of MET presented on the surface of the target mammalian cell as compared to a composition comprising the same amount of a control ABPC.

[0982] Embodiment 159 is the ABPC of any one of embodiments 129-157, wherein a composition comprising the ABPC does not result in a detectable reduction in the level of the MET presented on the surface of the target mammalian cell.

[0983] Embodiment 160 is the ABPC of any one of embodiments 96-159, wherein the target mammalian cell is a cancer cell.

[0984] Embodiment 161 is the ABPC of any one of embodiments 96-160, wherein the dissociation rate of the antigen-binding domain at a pH of about 4.0 to about 6.5 is at least 10% faster than the dissociation rate of the antigen-binding domain at a pH of about 7.0 to about 8.0.

[0985] Embodiment 162 is the ABPC of any one of embodiments 96-160, wherein the dissociation rate of the antigen-binding domain at a pH of about 4.0 to about 6.5 is at least 3-fold faster than the dissociation rate of the antigen-binding domain at a pH of about 7.0 to about 8.0.

[0986] Embodiment 163 is the ABPC of any one of embodiments 96-160, wherein the dissociation rate of the antigen-binding domain at a pH of about 4.0 to about 6.5 is at least 10-fold faster than the dissociation rate of the antigen-binding domain at a pH of about 7.0 to about 8.0.

[0987] Embodiment 164 is the ABPC of any one of embodiments 96-163, wherein the K_{D} of the antigen-binding domain at a pH of about 4.0 to about 6.5 is at least 10% greater than the K_{D} of the antigen-binding domain at a pH of about 7.0 to about 8.0.

[0988] Embodiment 165 is the ABPC of any one of embodiments 96-163, wherein the K_{D} of the antigen-binding domain at a pH of about 4.0 to about 6.5 is at least 3-fold greater than the K_{D} of the antigen-binding domain at a pH of about 7.0 to about 8.0.

[0989] Embodiment 166 is the ABPC of any one of embodiments 96-163, wherein the K_{D} of the antigen-binding domain at a pH of about 4.0 to about 6.5 is at least 10-fold greater than the K_{D} of the antigen-binding domain at a pH of about 7.0 to about 8.0.

[0990] Embodiment 167 is the ABPC of any one of embodiments 96-166, wherein the ABPC is cytotoxic or cytostatic to the target mammalian cell.

[0991] Embodiment 168 is the ABPC of any one of embodiments 96-167, wherein the ABPC is cross-reactive with a non-human primate MET and human MET.

[0992] Embodiment 169 is the pharmaceutical composition of any one of embodiments 96-167, wherein the ABPC is cross-reactive with a non-human primate MET, a human MET, and one or both of rat MET and a mouse MET.

[0993] Embodiment 170 is the pharmaceutical composition of embodiment 169, wherein the ABPC is cross-reactive with a non-human primate MET, a human MET, a rat MET, and a mouse MET.

[0994] Embodiment 171 is the ABPC of any one of embodiments 96-170, wherein the antigen-binding domain binds to an epitope of MET that is present on the surface of cells from an Old World Monkey.

[0995] Embodiment 172. The ABPC of any one of embodiments 96-171, wherein the ABPC comprises a single polypeptide.

[0996] Embodiment 173 is the ABPC of embodiment 172, wherein the antigen-binding domain is selected from the group consisting of: a VH domain, a VHH domain, a VNAR domain, and a scFv.

[0997] Embodiment 174 is the ABPC of embodiment 172 or 173, wherein the ABPC is a BiTe, a (scFv)₂, a nanobody, a nanobody-HSA, a DART, a TandAb, a scDiabody, a scDiabody-CH3, scFv-CH-CL-scFv, a HSAbody, scDiabody-HSA, or a tandem-scFv.

[0998] Embodiment 175 is the ABPC of any one of embodiments 96-171, wherein the ABPC comprises two or more polypeptides.

[0999] Embodiment 176 is the ABPC of embodiment 175, wherein the ABPC is selected from the group of an antibody, a VHH-scAb, a VHH-Fab, a Dual scFab, a F(ab′)₂, a diabody, a crossMab, a DAF (two-in-one), a DAF (four-in-one), a DutaMab, a DT-IgG, a knobs-in-holes common light chain, a knobs-in-holes assembly, a charge pair, a Fab-arm exchange, a SEEDbody, a LUZ-Y, a Fcab, a κλ-body, an orthogonal Fab, a DVD-IgG, a IgG(H)-scFv, a scFv-(H)IgG, IgG(L)-scFv, scFv-(L)IgG, IgG(L,H)-Fv, IgG(H)-V, V(H)-IgG, IgG(L)-V, V(L)-IgG, KIH IgG-scFab, 2scFv-IgG, IgG-2scFv, scFv4-Ig, Zybody, DVI-IgG, Diabody-CH3, a triple body, a miniantibody, a minibody, a TriBi minibody, scFv-CH3 KIH, Fab-scFv, a F(ab′)₂-scFv₂, a scFv-KIH, a Fab-scFv-Fc, a tetravalent HCAb, a scDiabody-Fc, a Diabody-Fc, a tandem scFv-Fc, a VHH-Fc, a tandem VHH-Fc, a VHH-Fc KiH, a Fab-VHH-Fc, an Intrabody, a dock and lock, an ImmTAC, an IgG-IgG conjugate, a Cov-X-Body, a scFv1-PEG-scFv2, an Adnectin, a DARPin, a fibronectin, and a DEP conjugate.

[1000] Embodiment 177 is the ABPC of any one of embodiments 111-176, wherein at least one polypeptide of the ABPC is conjugated to the toxin, the radioisotope, the drug, or the small molecule via a cleavable linker.

[1001] Embodiment 178 is the ABPC of any one of embodiments 111-176, wherein at least one polypeptide of the ABPC is conjugated to the toxin, the radioisotope, the drug, or the small molecule via a non-cleavable linker.

[1002] Embodiment 179 is the ABPC of any of embodiments 96-178, wherein the half-life of the ABPC in vivo is decreased as compared to the half-life of a control ABPC in vivo.

[1003] Embodiment 180 is the ABPC of embodiment 179, wherein the half-life of the ABPC in vivo is decreased about 5% to about 95% as compared to the half-life of a control ABPC in vivo.

[1004] Embodiment 181 is the ABPC of embodiment 179, wherein the half-life of the ABPC in vivo is decreased about 10% to about 95% as compared to the half-life of a control ABPC in vivo.

[1005] Embodiment 182 is the ABPC of embodiment 179, wherein the half-life of the ABPC in vivo is decreased about 30% to about 95% as compared to the half-life of a control ABPC in vivo.

[1006] Embodiment 183 is the ABPC of embodiment 179, wherein the half-life of the ABPC in vivo is decreased about 50% to about 95% as compared to the half-life of a control ABPC in vivo.

[1007] Embodiment 184 is the ABPC of embodiment 179, wherein the half-life of the ABPC in vivo is decreased about 70% to about 95% as compared to the half-life of a control ABPC in vivo.

[1008] Embodiment 185 is the ABPC of any one of embodiments 112-184, wherein the control ABPC is capable of specifically binding to MET or an epitope of MET presented on the surface of a target mammalian cell, wherein: (a) the control ABPC comprises a first antigen-binding domain; (b) the dissociation rate of the first antigen-binding domain of the control ABPC at a pH of about 4.0 to about 6.5 is no more than 3-fold faster than the dissociation rate at a pH of about 7.0 to about 8.0; and (c) the dissociation constant (K_{D}) of the first antigen-binding domain of the control ABPC at a pH of about 4.0 to about 6.5 is no more than 3-fold greater than the K_{D} at a pH of about 7.0 to about 8.0.

[1009] Embodiment 186 is the ABPC of any one of embodiments 112-184, wherein the control ABPC is capable of specifically binding to MET or an epitope of MET presented on the surface of a target mammalian cell, wherein: (a) the control ABPC comprises a first antigen-binding domain; (b) the dissociation rate of the first antigen-binding domain of the control ABPC at a pH of about 4.0 to about 6.5 is no more than 2-fold faster than the dissociation rate at a pH of about 7.0 to about 8.0; and (c) the dissociation constant (K_{D}) of the first antigen-binding domain of the ABPC at a pH of about 4.0 to about 6.5 is no more than 2-fold greater than the K_{D} at a pH of about 7.0 to about 8.0.

[1010] Embodiment 187 is the ABPC of any one of embodiments 112-184, wherein the control ABPC is capable of specifically binding to MET or an epitope of MET presented on the surface of a target mammalian cell, wherein: (a) the control ABPC comprises a first antigen-binding domain; (b) the dissociation rate of the first antigen-binding domain of the control ABPC at a pH of about 4.0 to about 6.5 is no more than 1-fold faster than the dissociation rate at a pH of about 7.0 to about 8.0; and (c) the dissociation constant (K_{D}) of the first antigen-binding domain of the control ABPC at a pH of about 4.0 to about 6.5 is no more than 1-fold greater than the K_{D} at a pH of about 7.0 to about 8.0.

[1011] Embodiment 188 is the ABPC of any one of embodiments 112-184, wherein the control ABPC is Telisotuzumab.

[1012] Embodiment 189 is the ABPC of any one of embodiments 96-188, wherein the ABPC further comprises a second antigen-binding domain.

[1013] Embodiment 190 is a kit comprising at least one dose of the ABPC of any one of embodiments 96-189.

[1014] Embodiment 191 is a method of treating a cancer characterized by having a population of cancer cells that have MET or an epitope of MET presented on their surface, the method comprising: administering a therapeutically effective amount of the pharmaceutical composition of any one of embodiments 1-94 or the ABPC of any one of embodiments 96-189 to a subject identified as having a cancer characterized by having the population of cancer cells.

[1015] Embodiment 192 is a method of reducing the volume of a tumor in a subject, wherein the tumor is characterized by having a population of cancer cells that have MET or an epitope of MET presented on their surface, the method comprising: administering a therapeutically effective amount of the pharmaceutical composition of any one of embodiments 1-94 or the ABPC of any one of embodiments 96-189 to a subject identified as having a cancer characterized by having the population of cancer cells.

[1016] Embodiment 193 is a method of inducing cell death in a cancer cell in a subject, wherein the cancer cell has MET or an epitope of MET presented on its surface, wherein the method comprises: administering a therapeutically effective amount of the pharmaceutical composition of any one of embodiments 1-94 or the ABPC of any one of embodiments 96-189 to a subject identified as having a cancer characterized by having a population of the cancer cells.

[1017] Embodiment 194 is the method of any one of embodiments 191-193, wherein the cancer is a primary tumor.

[1018] Embodiment 195 is the method of any one of embodiments 191-193, wherein the cancer is a metastasis.

[1019] Embodiment 196 is the method of any one of embodiments 191-195, wherein the cancer is a non-T-cell-infiltrating tumor.

[1020] Embodiment 197 is the method of any one of embodiments 191-195, wherein the cancer is a T-cell infiltrating tumor.

[1021] Embodiment 198 is a method of decreasing the risk of developing a metastasis or decreasing the risk of developing an additional metastasis in a subject having a cancer, wherein the cancer is characterized by having a population of cancer cells that have MET or an epitope of MET presented on their surface the method comprising: administering a therapeutically effective amount of the pharmaceutical composition of any one of embodiments 1-94 or the ABPC of any one of embodiments 96-189 to a subject identified as having a cancer characterized by having the population of cancer cells.

[1022] Embodiment 199 is the method of embodiment 198, wherein the cancer is a non-T-cell-infiltrating tumor.

[1023] Embodiment 200 is the method of embodiment 198, wherein the cancer is a T-cell infiltrating tumor.

[1024] The invention is further described in the following examples, which do not limit the scope of the invention described in the claims.

### EXAMPLES

### Example 1. Generation of MET Binders and Engineering of pH Binding Dependence

[1025] pH-engineered ABPCs specific for MET are generated using two methods. In the first approach, published monoclonal antibodies against MET are used as a starting template for introduction of additional mutations that allow engineering of pH-dependent binding to MET and i) enhanced endolysosomal accumulation of a conjugated toxin, as well as ii) enhanced MET recycling to the cell surface. The second approach involves discovery of de novo ABPCs specific for MET via antibody display methods from naive libraries or libraries with defined CDR compositions and screening under conditions designed for selection of pH-engineered ABPCs specific for MET. In either case, histidine residues play an important role in engineering pH-dependent binding proteins.

[1026] Histidine residues are at least partially protonated at a pH below 6.5 owing to its pKa of 6.0. Therefore, if a histidine side chain in an antigen-binding domain participates in an electrostatic binding interaction with its antigen it will start to turn positively charged at a pH at or below 6.5. This could either weaken or enhance the binding affinity of the interaction at a pH below 6.5, based on the corresponding charge of and interactions with the antigen epitope. Thus, systematic introduction of histidines into antibody complementarity determining regions (CDRs) in an antibody or other binder library (e.g., an scFv library) can be used to identify substitutions that will affect an antigen-binding domain's interaction with an antigen at lower pH values. The first approach therefore involves histidine-scanning of variable region sequences of published monoclonal antibodies to identify pH-dependent variants.

[1027] Multiple MET-binding monoclonal antibodies have been described in the literature and can be used as a template for engineering pH-dependent binding [Wang J et al (2017) ABBV-399, a c-Met Antibody-Drug Conjugate that Targets Both MET-Amplified and c-Met-Overexpressing Tumors, Irrespective of MET Pathway Dependence, Clin Cancer Res, 23:992-1000]. Briefly, for a subset of the antibody sequences, CDRs in each chain are identified using the methods described by Kabat et al (Kabat et al. (1992) Sequences of Proteins of Immunological Interest (DIANE publishing) and IMGT (Lefranc M P (1999) “The IMGT unique numbering for Immunoglobulins, T cell receptors and Ig-like domains” The Immunologist 7, 132-136), and for each CDR, residues falling under either or both Kabat and IMGT CDR definitions were called as CDR residues. To engineer pH-dependent sequence variants, individual amino acid residues within the heavy chain and/or light chain CDRs are systematically substituted with a histidine, one at a time. In cases where the starting CDR residue is a histidine, it is mutated to an alanine. Antibody variants with only one histidine or alanine mutation in a heavy/light chain CDR are generated by co-transfection of Expi293 cells with a) one heavy chain or light chain sequence variant, and b) the corresponding starting ABPC (e.g., the starting MET-binding monoclonal antibody) light chain or heavy chain, respectively, using methods known to the art. After allowing for a period of protein expression, cell culture supernatants are collected, quantified, and the pH dependence of the variant is evaluated using biolayer interferometry (BLI) or other methods known to the art. Briefly, cell culture supernatants are normalized to an antibody expression level of 50 pg/mL, and captured on an anti-human Fc sensor (Forte Bio). A baseline is established using 1× kinetics buffer (Forte Bio), and the sensor is associated with 100 nM of MET in 1×PBS at pH 7.4 for 300 sec to generate an association curve. In the dissociation phase, the antibody-antigen complex on the sensor is exposed to 1×PBS at either pH 5.5 or pH 7.4 for 300-500 sec. Association and dissociation phase curves are examined for the starting ABPC antibody and each corresponding antibody variant at pH 5.5 and pH 7.4 to inform on two criteria: a) enhanced dissociation (i.e., higher koff values) at pH 5.5 due to histidine or alanine substitution compared to the starting ABPC, and b) reduced dissociation at pH 7.4 (i.e., lower koff values) compared to pH 5.5 in the antibody variant itself and with the starting ABPC. Variants that show either enhanced dissociation at pH 5.5 or reduced dissociation at pH 7.4 or both are selected for further analysis. It is also noted that while some histidine and alanine mutations obliterate MET binding, others are tolerated with little (e.g., less than 1-fold change in K_{D} or dissociation rate) or no change in MET binding kinetics. Especially because histidine is a large, positively charged amino acid, these histidine variants and alanine variants with no change are noted as positions that may tolerate a wide range of mutations and lead to antibodies with different sequence but similar binding properties, a designation that is not otherwise apparent. The variants selected for further analysis are expressed at a larger scale and purified using protein A affinity chromatography. Binding kinetics (kon and koff) of the purified starting ABPC and variant antibodies are measured at pH 5.5 and pH 7.4 using Biacore (GE Healthcare). The ratio of the antibody's rate of dissociation (koff at pH 7.4 divided by koff at pH 5.5) is also used as a quantitative assessment of pH-dependent binding; similarly, the dissociation constant KD is calculated at both pH 5.5 and pH 7.4 as koff divided by kon and the ratio of the antibody's dissociation constant (KD at pH 7.4 divided by KD at pH 5.5) is also used as a quantitative assessment of pH-dependent binding. Antibodies with a rate of dissociation ratio less than that of the starting ABPC and/or a dissociation constant ratio less than that of the starting ABPC are selected for further assessment of combinatorial substitutions. Favorable histidine and/or alanine amino acid positions can also be combined to enhance pH dependence; this can be done by, e.g., combinatorially or rationally combining histidine and/or alanine substitutions on a given heavy or light chain that individually improve pH dependence, by, e.g., combinatorially or rationally combining modified heavy and light chains such that histidine and/or alanine substitutions are present on both chains, or combinations thereof. Such combinatorial variants are generated and tested/analyzed for differential pH dependence using the methods and protocols described herein, or others known to the art. Antibody variants that have the lowest rate of dissociation ratios and/or dissociation constant ratios are selected as candidates for further analysis (hereafter referred to as “pH-engineered ABPCs specific for MET”).

[1028] The second method for selection of pH-engineered ABPCs specific for MET involves either screening libraries to identify de novo pH-dependent ABPCs specific for MET or ABPCs that could serve as templates for engineering pH-dependent binding as described herein. Two types of libraries can be used for these selections: naive phage/yeast display antibody libraries (e.g., Fab, scFv, VHH, VL, or others known to the art) or phage/yeast display libraries where CDRs have been mutated to express a subset of amino acid residues. Libraries are screened against soluble recombinant MET extracellular domains using methods known to the art with positive selection for variants that bind weakly (e.g., are eluted from beads) at pH 5.0 and bind strongly (e.g., are bound to beads) at pH 7.4. Three rounds of selections are performed. The final round of binders are screened using ELISA for binding to human MET and cyno MET and mouse MET or via mean fluorescence intensity in flow cytometric analysis. If more binders with cyno or murine cross-reactivity are desired, the final selection round can instead be performed on cyno MET or murine MET. Selected binding proteins are subcloned into mammalian expression vectors and expressed as either full IgG proteins or Fc fusions in Expi293 cells. BLI analysis is performed as described herein for selection of pH-dependent binder variants and confirmed using Biacore.

### Example 2. In Vitro Demonstration of pH-Dependent Binding to MET, pH-Dependent Release of MET, Enhanced Endolysosomal Delivery in MET+ Cells, and Increased MET Antigen Density in MET+ Cells after Exposure to pH-Engineered ABPCs Specific for MET as Compared to Control ABPCs Specific for MET

[1029] As discussed herein, pH-engineered ABPCs specific for MET exhibit the desirable property of decreased MET binding at acidic pH (e.g., pH 5.0, pH 5.5), but enhanced binding at higher pH (e.g., pH 7.4), which enhances their accumulation in endolysosomes under physiological conditions.

pH-Dependent Binding to MET on Cells

[1030] To demonstrate that pH-engineered ABPCs specific for MET binds cell surface MET at neutral pH, a cell surface binding assay is performed. A panel of human cells that are MET+is assembled (e.g., Hs 746T ATCC Cat #HTB-135, NCI-H441 ATCC Cat #HTB-174, NCI-H820 ATCC Cat #HTB-181). Methods of identifying and quantifying gene expression (e.g., MET) for a given cell line are known to the art, and include, e.g., consulting the Cancer Cell Line Encyclopedia (CCLE; https://portals.broadinstitute.org/ccle) to ascertain the expression level and/or mutation status of a given gene in a tumor cell line), rtPCR, microarray, or RNA-Seq analysis, or cell staining with antibodies known in the art (e.g. Telisotuzumab or Cell Signaling Technology Met (D1C2) XP Rabbit mAb Cat #8198, or R&D Systems Human HGFR/c-MET Antibody Clone #95106 Cat #MAB3582 for MET). Cells are seeded at approximately 5-10,000 per well in 150 μL of pH 7.4 culture medium and incubated at 37° C. for 5 minutes at several doses (e.g., a two-fold dilution series) from 1 pM to 1 μM with one of the following antibodies: a known, control ABPC specific for MET (e.g., an antibody, Telisotuzumab, emibetuzumab, hucMET27Gv1.3, or P3D12), the pH-engineered ABPC specific for MET, and an appropriate negative isotype control mAb (e.g., Biolegend Purified Human IgG1 Isotype Control Recombinant Antibody, Cat #403501). Prior to the onset of the experiment, the binding properties of all antibodies are validated using methods known to the art. Following the 5 minute incubation, cells are fixed with 4% formaldehyde (20 min at room temperature) and incubated with an appropriate fluorophore-labeled secondary antibody (e.g., ThermoFisher Mouse anti-Human IgG1 Fc Secondary Antibody, Alexa Fluor 488, Cat #A-10631) for 60 minutes. Unbound reagents are washed with a series of PBS washes, and the cell panels are imaged using confocal microscopy. Upon analysis of the images, significant fluorescence can be observed on the surface of cells bound with the known, control ABPC specific for MET as well as the pH-engineered ABPC specific for MET, but little surface binding can be observed for the isotype negative control. To isolate the effect of pH on surface binding, the same experiment is repeated twice, with the primary antibody incubation taking place at sequentially lower pH (e.g., pH 6.5 and 5.5 and 5.0). Analysis of the resulting confocal microscopy images can show significant fluorescence on the surface of cells bound with all mAbs tested, excepting the isotype negative control, and that this fluorescence decreases for the pH-engineered ABPC specific for MET as the pH decreases. Alternatively, cells are analyzed for mean fluorescent intensity by flow cytometry using methods known in the art. A dissociation constant K_{D} on cells at neutral pH of the antibodies analyzed is determined by nonlinear regression methods known in the art (e.g., a Scatchard plot). Taken together, the results can show that the pH engineering process results in the creation of a pH-engineered ABPC specific for MET that is pH-dependent in its binding properties and that it more effectively binds at neutral pH as compared to more acidic pH. Other methods of assessing the pH dependence of the pH-engineered ABPCs specific for MET are known in the art and include, e.g., using flow cytometry to measure ABPC surface binding.

pH-Dependent Release of MET on Cells

[1031] To demonstrate that pH-engineered ABPCs specific for MET are capable of releasing MET at low pH after binding at a neutral pH, a variant of the cell surface binding assay described above is performed using methods known to the art (e.g., as generally described in Gera N. (2012) PLoS ONE 7(11): e48928). Briefly, an appropriate MET+ cell line (passage number less than 25) is harvested and 50,000 cells per well are plated in a U-Bottomed 96-well microplate. Three conditions are tested; binding and secondary staining at pH 7.4, binding and secondary staining at pH 5.0, and binding at pH 7.4 followed by release at pH 5.0 for 30 minutes and secondary staining at pH 7.4. Both pH-engineered ABPCs specific for MET as well as a control ABPC specific for MET are tested. The cells are washed two times with 200 μL of FACS buffer (lx PBS containing 3% Fetal Bovine Serum) at either pH 7.4 or 5.0 depending on the condition being tested. The purified protein samples are diluted into FACS buffer of the appropriate pH and added to the cells and allowed to bind for one hour on ice. After incubation with the primary antibodies the pH 7.4 and pH 5.0 conditions are washed twice as before, and then 100 μl of secondary rat anti-human Fc AF488 (BioLegend 410706) or other appropriate antibody, diluted 1:50, or anti Myc-Tag mouse mAb-AF488 (Cell Signaling Technologies 2279S) diluted 1:50 is added in FACS buffer of the appropriate pH, and incubated for 30 minutes on ice. The pH 5.0 release condition is washed twice with FACS buffer pH 7.4 and then resuspended in 100 μl of FACS buffer pH 5.0 and incubated on ice for 30 minutes, followed by secondary staining in FACS buffer pH 7.4 as described for the other conditions. The plates are washed twice as before and resuspended in 1% paraformaldehyde in the appropriate FACS buffer to fix them for flow cytometry analysis. All conditions are read on a flow cytometer (Accuri C6, BD Biosciences). Binding is observed as a shift in the FL1 signal (as a mean fluorescence intensity) versus secondary alone. Upon analysis of the data, it can be determined that both the pH-engineered ABPC specific for MET as well as the control ABPC specific for MET effectively bind the surface of MET+ cells at neutral pH, but the pH-engineered ABPC specific for MET binds poorly at pH 5.0; similarly, it can be determined that the pH-engineered ABPC specific for MET binds effectively at pH 7.4, but then releases/unbinds MET at pH 5.0.

Enhanced Endolysosomal Delivery in MET+ Cells of pH-Engineered ABPCs Specific for MET as Compared to Control ABPCs Specific for MET (pHrodo)

[1032] To verify and demonstrate that ABPCs specific for MET achieve endolysosomal localization following cellular uptake, an internalization assay is performed using methods known to the art (e.g., Mahmutefendic et al., Int. J. Biochem. Cell Bio., 2011). Briefly, as described herein, a panel of human cells that express MET highly is assembled using methods known to the art. Cells are plated, washed three times with PBS, and incubated at 37 degrees C. for 60 minutes in media at neutral pH, with added concentrations of 2 micrograms per milliliter of a known, control ABPC specific for MET (e.g., as described herein), the pH-engineered ABPC specific for MET, and an appropriate negative isotype control mAb (e.g., as described herein). In a subset of cells, validation of antibody internalization and endosomal localization is performed using methods known to the art; e.g., cells are fixed in 4% formaldehyde as described herein, permeabilized using TWEEN 20 or other methods known to the art (Jamur M C et al (2010) Permeabilization of cell membranes, Methods Mol Biol. 588:63-6), additionally stained with an endosomal marker, e.g., a fluorescent RAB11 antibody (RAB11 Antibody, Alexa Fluor 488, 3H18L5, ABfinity™ Rabbit Monoclonal), stained with an appropriate fluorescently labeled anti-human secondary antibody (e.g., as described herein), and imaged using confocal fluorescence microscopy, as described herein. Analysis of the confocal images can be used to show that both the pH-engineered ABPC specific for MET as well as the control ABPC specific for MET are internalized and accumulate in the endolysosomes.

[1033] To demonstrate that pH-engineered ABPCs specific for MET achieve enhanced endolysosomal accumulation relative to a control ABPC specific for MET, a pHrodo-based internalization assay is performed using both a known, control ABPC specific for MET (e.g., as described herein) as well as the pH-engineered ABPC specific for MET. The assay makes use of pHrodo™ iFL (P36014, ThermoFisher), a dye whose fluorescence increases with decreasing pH, such that its level of fluorescence outside the cell at neutral pH is lower than its level of fluorescence inside the acidic pH environment of endolysosomes. Briefly, an appropriate MET+ cell line (less than passage 25) is suspended in its recommended media (e.g., by cell banks or cell bank databases ATCC, DSMZ, or ExPASy Cellosaurus) and plated in a 24-well plate at a density of 2,000,000 cells/mL, 1 mL per well. While keeping the cells on ice, 1 mL of 2× pHrodo iFL-labeled antibody (prepared in accordance with the manufacturer's instructions) is added to each well, the well is pipetted/mixed five times, and the plate is incubated in a light-protected environment for 45 minutes, on ice. An identical but separate plate is also incubated on ice that is meant as a no-internalization negative control. Following this incubation, the experimental plate is moved to a 37 degree C. incubator, the negative control plate is kept on ice to slow or block internalization, and samples are taken at designated time points to create an internalization time course. Samples are placed into a U-bottom 96-well plate, and internalization is quenched via addition of 200 μL/well of ice-cold FACS buffer. The plates are spun down at 2000×g for 2 minutes, resuspended in 200 μL ice-cold FACS buffer, spun down again, and resuspended in FACS buffer a second time. Finally, the samples are loaded into a flow cytometer for read-out of cellular pHrodo fluorescence using excitation and emission wavelengths consistent with the excitation and emission maxima of the pHrodo iFL Red dye (566 nm and 590 nm, respectively). Upon completion of the flow cytometry experiment and analysis of the data, it can be observed that cells treated with the pH-engineered ABPC specific for MET have a higher pHrodo iFL signal relative to a known, control ABPC specific for MET, indicating that pH-engineered ABPCs specific for MET achieve enhanced endolysosomal accumulation relative to a control ABPC specific for MET.

[1034] Alternatively, to demonstrate that pH-engineered ABPCs specific for MET achieve enhanced endolysosomal accumulation relative to a control ABPC specific for MET, a variation of the above-described experiment is performed. MET+ cells are plated, washed three times with PBS, and incubated at 37 degrees C. for 60 minutes in media at neutral pH with added concentrations of 2 μg/mL of either pH-engineered ABPC specific for MET or control ABPC specific for MET. Following incubation, cells are washed three times with PBS, fixed and permeabilized, and stained with a panel of appropriately selected antibodies that bind late endosomal markers as well as lysosomes (e.g., RAB7, and LAMP1; Cell Signaling Technology, Endosomal Marker Antibody Sampler Kit #12666; AbCam, Anti-LAMP2 antibody [GL2A7], ab13524). After primary antibody staining, cells are stained with an appropriate mixture of fluorescently labeled secondary antibodies (e.g., Goat Anti-Human IgG (H&L) Secondary Antibody (Alexa Fluor 647), Cat #A-21445, and Abcam Goat Anti-Rabbit IgG H&L (Alexa Fluor 488), Cat #ab150077), imaged using confocal fluorescence microscopy, and regions of co-localization of signal from MET-specific antibodies and endosomal markers are visualized and quantified. Upon analysis of the data, it can be revealed that there is increased co-localization of endolysosomal and MET-specific antibody signal in wells treated with the pH-engineered ABPCs specific for MET as compared to wells treated with control ABPC specific for MET, and can thereby demonstrate that pH-engineered ABPCs specific for MET achieve enhanced endolysosomal accumulation relative to control ABPC specific for MET.

Increased MET Antigen Density in MET+ Cells after Exposure to pH-Engineered ABPCs Specific for MET as Compared to Control ABPCs Specific for MET

[1035] To demonstrate that treatment of cells with the pH-engineered ABPCs specific for MET does not result in a detectable reduction of the level of MET on the surface of cells exposed to the pH-engineered ABPCs specific for MET, or that said treatment results in less of a reduction of the level of MET on the surface of cells exposed to the pH-engineered ABPC specific for MET versus a control ABPC specific for MET, an antigen density study is performed using flow cytometry. Briefly, 4.0×10\hat{ }5 cells that express MET are plated per well in a 96-well plate in 100 μL media. Cells are treated with a titration from 1 pM to 1 μM of i) pH-engineered ABPCs specific for MET, ii) a first control ABPC specific for MET, iii) an appropriate isotype control, and iv) an untreated control. Cells are incubated for 2 hours at 37° C., at which point all cells are incubated with 200 nM of a fluorophore-labeled second control ABPC specific for MET (e.g., as described herein) which has a different epitope (as determined by, e.g., competitive binding studies on cells) than either the first control ABPC specific for MET or the pH-engineered ABPCs specific for MET for 30 minutes at 4° C. Following this 30-minute incubation, the mean fluorescence intensity (MFI) of all cells is read out using, e.g., flow cytometry, using methods known to one of ordinary skill in the art. In parallel, a quantitative standard curve that can be used to quantify the presence of MET on the surface of treated cells as a function of MFI is generated using a commercially available quantification kit (e.g., BD Biosciences PE Phycoerythrin Fluorescence Quantitation Kit, catalog #340495); the quantitative standard curve is created by following the manufacturer's instructions. Other methods of determining the absolute number of MET on the cell surface are known in the art and include, e.g., use of radioisotopically labeled reagents. Upon analysis of the data, it can be revealed that at least one antibody concentration, cells treated with a control ABPC specific for MET experience a reduction of the level of MET on their surface, whereas cells treated with pH-engineered ABPCs specific for MET experience a significantly smaller reduction or no reduction at all, both relative to the isotype and untreated controls.

### Example 3. Conjugation of pH-Engineered and Control ABPCs Specific for MET to Cytotoxic Drugs

[1036] An antigen-binding protein construct conjugate (ADC) is made comprising the MET-binding IgG (hereafter, MET-IgG) described herein linked to monomethyl auristatin E (MMAE) via a valine-citrulline (vc) linker (hereafter, MET-IgG-DC). Conjugation of the antigen-binding protein construct with vcMMAE begins with a partial reduction of the MET-IgG followed by reaction with maleimidocaproyl-Val-Cit-PABC-MMAE (vcMMAE). The MET-IgG (20 mg/mL) is partially reduced by addition of TCEP (molar equivalents of TCEP:mAb is 2:1) followed by incubation at 0° C. overnight. The reduction reaction is then warmed to 20° C. To conjugate all of the thiols, vcMMAE is added to a final vcMMAE:reduced Cys molar ratio of 1:15. The conjugation reaction is carried out in the presence of 10% v/v of DMSO and allowed to proceed at 20° C. for 60 minutes.

[1037] After the conjugation reaction, excess free N(acetyl)-Cysteine (2 equivalents vs. vcMMAE charge) is added to quench unreacted vcMMAE to produce the Cys-Val-Cit-MMAE adduct. The Cys quenching reaction is allowed to proceed at 20° C. for approximately 30 minutes. The Cys-quenched reaction mixture is purified as per below. The above conjugation method can also be used to conjugate maleimidocaproyl monomethylauristatin F (mcMMAF) to an antigen-binding protein construct.

[1038] The MET-IgG-DC is purified using a batch purification method. The reaction mixture is treated with the appropriate amount of water washed Bu-HIC resin (ToyoPearl; Tosoh Biosciences), i.e., seven weights of resin is added to the mixture. The resin/reaction mixture is stirred for the appropriate time, and monitored by analytical hydrophobic interaction chromatography for removal of drug conjugate products, filtered through a coarse polypropylene filter, and washed by two bed volumes of a buffer (0.28 M sodium chloride, 7 mM potassium phosphate, pH 7). The combined filtrate and rinses are combined and analyzed for product profile by HIC HPLC. The combined filtrate and rinses are buffer exchanged by ultrafiltration/diafiltration (UF/DF) to 15 mM histidine, pH 6 with 10 diavolumes 15 nM histidine buffer.

[1039] A similar protocol can be used to conjugate DNA toxins such as SG3249 and SGD-1910 to MET-IgG (see Tiberghien A C et al (2016) Design and Synthesis of Tesirine, a Clinical Antibody—Drug Conjugate Pyrrolobenzodiazepine Dimer Payload, ACS Med Chem Lett 7:983-987). Briefly, for SG3249, MET-IgG (15 mg, 100 nanomoles) is diluted into 13.5 mL of a reduction buffer containing 10 mM sodium borate pH 8.4, 2.5 mM EDTA and a final antibody concentration of 1.11 mg/mL. A 10 mM solution of TCEP is added (1.5 molar equivalent/antibody, 150 nanomoles, 15 microliters) and the reduction mixture is heated at +37° C. for 1.5 hours in an incubator. After cooling down to room temperature, SG3249 is added as a DMSO solution (5 molar equivalent/antibody, 500 nanomoles, in 1.5 mL DMSO). The solution is mixed for 1.25 hours at room temperature, then the conjugation is quenched by addition of N-acetyl cysteine (1 micromole, 100 microliters at 10 mM), and injected into an AKTA™ Pure FPLC using a GE Healthcare HiLoad™ 26/600 column packed with Superdex 200 PG, and eluted with 2.6 mL/min of sterile-filtered phosphate-buffered saline (PBS). Fractions corresponding to the MET-IgG-DC monomer peak are pooled, concentrated using a 15 mL Amicon Ultracell 50 KDa MWCO spin filter, analysed and sterile-filtered. UHPLC analysis on a Shimadzu Prominence system using a Phenomenex Aeris 3.6u XB-C18 150×2.1 mm column eluting with a gradient of water and acetonitrile on a reduced sample of MET-IgG-DC at 280 nm and 330 nm (SG3249 specific) can show a mixture of light and heavy chains attached to several molecules of SG3249, consistent with a drug-per-antibody ratio (DAR) of 1 to 4 molecules of SG3249 per antibody. UHPLC analysis on a Shimadzu Prominence system using a Phenomenex Yarra 3u SEC-3000 300 mm×4.60 mm column eluting with sterile-filtered SEC buffer containing 200 mM potassium phosphate pH 6.95, 250 mM potassium chloride and 10% isopropanol (v/v) on a sample of MET-IgG-DC at 280 nm can show a monomer purity of over 90% with no impurity detected. UHPLC SEC analysis allows determination of final MET-IgG-DC yield of greater than 30%.

[1040] Alternatively, methods to conjugate toxins to antibodies via lysine residues are known in the art (e.g., see Catcott K C et al (2016) Microscale screening of antibody libraries as maytansinoid antibody-drug conjugates, MAbs 8:513-23). In addition, similar methods to the above can be used to conjugate drugs and toxins to non-IgG formats with disulfide bonds, such as Vh-Fcs.

### Example 4. Demonstration of Enhanced Cytotoxicity of pH-Engineered ABPC ADCs Specific for MET in MET+ Cells as Compared to a Control ABPC ADC Specific for MET

[1041] The cytotoxic activity of both pH-engineered ADCs specific for MET (e.g., a pH-engineered MET-IgG-DC) and control ABPC ADCs specific for MET (e.g., a control ABPC MET-IgG-DC) are separately evaluated on a panel of MET+ cell lines expressing a variety of antigen densities (e.g., as described herein) and a MET− cell line (e.g., T-47D ATCC Cat #HTB-133), selected using the methods described herein, and, optionally, cells expressing transgenic MET, e.g., HEK293 cells transfected with MET using methods known in the art (e.g., Expi293™ Expression System Kit ThermoFisher Catalog number: A14635). For purposes of validation, prior to use, all cell lines are tested for expression of MET using methods known to the art, e.g., qPCR, flow cytometry, mRNA RPKM, and antibody staining using anti-MET antibodies known to the art (e.g., as described herein) followed by visualization of the stain using fluorescence microscopy, immunohistochemistry, flow cytometry, ELISA, or other methods known to the art. To evaluate the cytotoxicity of compounds, cells are seeded at approximately 10-40,000 per well in 150 microliters of culture medium, then treated with graded doses of compounds from 1 pM to 1 μM in quadruplicates at the initiation of the assay. Cytotoxicity assays are carried out for 96 hours after addition of test compounds. Fifty microliters of resazurin dye are added to each well during the last 4 to 6 hours of the incubation to assess viable cells at the end of culture. Dye reduction is determined by fluorescence spectrometry using the excitation and emission wavelengths of 535 nm and 590 nm, respectively. For analysis, the extent of resazurin reduction by the treated cells is compared to that of untreated control cells, and percent cytotoxicity is determined. Alternatively, a WST-8 kit is used to measure cytotoxicity per the manufacturer's instructions (e.g., Dojindo Molecular Technologies Catalog #CCK-8). IC50, the concentration at which half-maximal killing is observed, is calculated using curve-fitting methods known in the art. Upon analysis of the data, it can be determined that pH-engineered and control ABPC ADCs specific for MET are substantially cytotoxic to one or more MET+ cell line, but less toxic to MET− cells. It also can be determined that pH-engineered ADCs specific for MET are more cytotoxic to one or more MET+ cell lines than control ABPC ADCs specific for MET because: a) they show greater depth of killing at one or more concentrations or, b) they show lower IC50 or, c) they show a greater ratio of their dissociation constant K_{D} on cells at neutral pH (as described herein) divided by their IC50 on those same cells.

[1042] Additionally, the cytotoxic activity of ABPCs specific for MET can be measured in a secondary ADC assay. Secondary ADC assays are known in the art (e.g., Moradec Cat # αHFc-NC-MMAF and Cat #αHFc-CL-MMAE, and associated manufacturer's instructions). Briefly, the assay is carried out as in the previous paragraph, except the ABPC specific for MET is substituted for the ADC specific for MET, and to evaluate the cytotoxicity of compounds, cells are seeded at approximately 10-40,000 per well in 150 microliters of culture medium, then treated with graded doses of ABPC specific for MET from 1 pM to 1 μM (final concentration in culture medium, having been pre-mixed with 100 nM, final concentration in culture medium, of Moradec Cat # αHFc-NC-MMAF secondary ADC reagent and pre-incubated at 37° C. for 30 min before addition of the mixture to the culture medium) in quadruplicates at the initiation of the assay.

[1043] The cytotoxic activity of pH-engineered ADCs specific for MET and control ABPC ADCs specific for MET conjugates, as well as ABPCs specific for MET in a secondary ADC assay, are additionally measured by a cell proliferation assay employing the following protocol (Promega Corp. Technical Bulletin TB288; Mendoza et al., Cancer Res. 62:5485-5488, 2002):
[1044] 1. An aliquot of 100 microliters of cell culture containing about 104 cells (e.g., MET+ cells as described herein) in medium is deposited in each well of a 96-well, opaque-walled plate.
[1045] 2. Control wells are prepared containing medium and without cells.
[1046] 3. ADC specific for MET is added to the experimental wells at a range of concentrations from 1 pM-1 uM and incubated for 1-5 days. Alternatively, in a secondary ADC assay, 100 nM secondary ADC reagent (final concentration in culture medium, Moradec Cat #αHFc-NC-MMAF) and ABPC specific for MET at a range of concentrations from 1 pM-1 uM (final concentration in culture medium) are pre-mixed and pre-incubated at 37° C. for 30 min before addition of the mixture to the culture medium, and incubated for 1-5 days.
[1047] 4. The plates are equilibrated to room temperature for approximately 30 minutes.
[1048] 5. A volume of CellTiter-Glo Reagent equal to the volume of cell culture medium present in each well is added.
[1049] 6. The contents are mixed for 2 minutes on an orbital shaker to induce cell lysis.
[1050] 7. The plate is incubated at room temperature for 10 minutes to stabilize the luminescence signal.
[1051] 8. Luminescence is recorded and reported in graphs as RLU=relative luminescence units.

### Example 5. Demonstration of Enhanced Toxin Liberation of pH-Engineered ABPC ADCs Specific for MET in MET+ Cells as Compared to a Control ABPC ADC Specific for MET

[1052] The pH-engineered ADCs specific for MET (e.g., a pH-engineered MET-IgG-DC) can also demonstrate increased toxin liberation in MET+ cells as compared to a control ABPC ADC specific for MET (e.g., a control ABPC MET-IgG-DC). After treatment of MET+ cells with pH-engineered and control ABPC ADCs specific for MET as described herein, an LC-MS/MS method is used to quantify unconjugated (i.e., liberated) MMAE in treated MET+ cells (Singh, A. P. and Shah, D. K. Drug Metabolism and Disposition 45.11 (2017): 1120-1132.) An LC-MS/MS system with electrospray interphase and triple quadrupole mass spectrometer is used. For the detection of MMAE, a XBridge BEH Amide column (Waters, Milford, Mass.) is used with mobile phase A as water (with 5 mM ammonium formate and 0.1% formic acid) and mobile phase B as 95:5 acetonitrile/water (with 0.1% formic acid and 1 mM ammonium formate), using a gradient at a flow rate of 0.25 mL/min at 40° C. The total duration of the chromatographic run is 12 minutes, where two MRM scans (718.5/686.5 and 718.5/152.1 amu) are monitored. Deuterated (d8) MMAE (MCE MedChem Express, Monmouth Junction, N.J.) is used as an internal standard. First, an equation for quantifying unconjugated MMAE in a biological sample is derived by dividing the peak area for each drug standard by the peak area obtained for the internal standard. The resultant peak area ratios are then plotted as a function of the standard concentrations, and data points are fitted to the curve using linear regression. Three QC samples are included in the low, middle, and upper ranges of the standard curve to assess the predictive capability of the developed standard curve. The standard curves obtained are then used to deduce the observed concentrations of MMAE in a biologic sample. For measurement of MMAE concentration, treated cell samples are pelleted and reconstituted in fresh media to a final concentration of 0.25 million cells/100 μL. Samples are spiked with d8-MMAE (1 ng/mL) before performing cell lysis by the addition of a 2-fold volume of ice-cold methanol followed by freeze-thaw cycle of 45 minutes at −20° C. The final cell lysate is obtained by centrifuging the samples at 13,000 rpm for 15 minutes at 4° C. followed by collection of supernatant. For the preparation of standards and QC samples, a fresh cell suspension (0.25 million/100 μl) is spiked with known concentrations of MMAE and internal standard (d8-MMAE) before a procedure similar to the cell lysis mentioned above. The resulting cell lysates are then evaporated and reconstituted in mobile phase B before injection into LC-MS/MS. The concentration of unconjugated MMAE in lysates of MET+ cells treated with pH-engineered ADCs specific for MET is observed to be greater than that in MET+ cells treated with control ABPC ADC specific for MET.

[1053] For tubulin-inhibiting toxins, toxin liberation is also assessed by monitoring of cell viability and cell cycle phase. ˜2.0×10\hat{ }5 MET+ cells are plated in a 96-well flat bottom plate and treated with pH-engineered and control ABPC ADCs specific for MET as described herein. After treatment, cells are transferred to a 96-round bottom plate, and the plate is centrifuged at 400 rcf for 2 min to decant supernatant. Decanted cells are stained with Live/Dead eFluor 660. Cells are then centrifuged and washed with FACS buffer (PBS with 2% FBS), after which cell cycle distribution is analyzed with a BD Cycletest™ Plus DNA Kit (cat #340242). Briefly, cells are re-suspended in 76 ul Solution A and incubated for 10 min at room temperature. 61 μL Solution B is then added, and cells are incubated for another 10 min at room temperature. Finally, 61 μL of cold Solution C is added, and cells are again incubated for 10 min at room temp. Immediately after the last incubation step, cells are analyzed by flow cytometry (without washing) at a flow rate of 10 μL/sec. Increased G2/M-phase arrest can be observed with exposure to pH-engineered ADCs specific for MET as compared to control ABPC ADC specific for MET.

[1054] For DNA-damaging toxins (e.g., pyrrolobenzodiazepine or “PBD”), DNA damage is assessed by measuring the phosphorylated histone H2AX (γH2AX). H2AX is normally phosphorylated in response to double-strand breaks in DNA; however, increased levels γH2AX may also be observed as a result of treatment with DNA-cross-linking toxins such as PBD or cisplatin (Huang, X. et al. 2004, Cytometry Part A 58A, 99-110). MET+ cells are treated with pH-engineered and control ABPC ADCs specific for MET as described herein. After treatment, cells are rinsed with PBS, and then fixed in suspension in 1% methanol-free formaldehyde (Polysciences, Warrington, Pa.) in PBS at 0° C. for 15 min. Cells are resuspended in 70% ethanol for at least 2 h at −20° C. Cells are then washed twice in PBS and suspended in 0.2% Triton X-100 (Sigma) in a 1% (w/v) solution of BSA (Sigma) in PBS for 30 min to suppress nonspecific Ab binding. Cells are centrifuged again (200 g, 5 min) and the cell pellet is suspended in 100 μL of 1% BSA containing 1:800 diluted anti-histone γH2AX polyclonal Ab (Trevigen, Gaithersburg, Md.). The cells are then incubated overnight at 4° C., washed twice with PBS, and resuspended in 100 μL of 1:30 diluted FITC-conjugated F(ab′)2 fragment of swine anti-rabbit immunoglobulin (DAKO, Carpinteria, Calif.) for 30 min at room temperature in the dark. The cells are then counterstained with 5 μg/mL of PI (Molecular Probes, Eugene, Oreg.) dissolved in PBS containing 100 μg/mL of DNase-free RNase A (Sigma), for 20 min at room temperature. Cellular fluorescence of the FITC γH2AX signal and the PI counterstain are measured using flow cytometry using methods known in the art. When comparing cells within the same stage of the cell cycle (based on total DNA content), treated MET+ cells can be observed to have an increased FITC γH2AX signal relative to untreated MET+ cells (which serve as a baseline). Furthermore, MET+ cells treated with pH-engineered ADCs specific for MET can be observed to have a greater increase in levels of γH2AX over baseline than cells treated with a control ABPC ADC specific for MET. In addition to the γH2AX assay, DNA cross-linking can be more directly assessed with a Comet assay (Chandna, S. (2004) Cytometry 61A, 127-133).

[1055] In addition, as disclosed herein, pH-engineered and control ABPCs can be assayed using the methods in this example without direct conjugation by performing a secondary ADC assay instead of using primary conjugated ADCs.

### Example 6. Demonstration of Decreased Half-Life of pH-Engineered ABPCs Specific for MET as Compared to a Control ABPC Specific for MET

[1056] One of the surprising aspects of the pH-engineered ABPCs specific for MET described by the invention can be their ability to facilitate increased dissociation of ABPCs from the MET within the endosome or lysosome resulting in a decreased serum half-life relative to control ABPCs specific for MET or ABPCs that are not specific for MET. This decreased serum half-life is due to the enhanced frequency with which pH-engineered ABPCs specific for MET are cleared from circulation due to their enhanced cellular internalization once bound to MET, which over time can be observed through a decrease in serum concentration of unbound pH-engineered ABPC specific for MET. To demonstrate these properties, a series of animal studies in mice and/or monkeys is performed using pH-engineered ABPC specific for MET and control ABPC specific for MET using methods known to the art (e.g., Gupta, P., et al. (2016), mAbs, 8:5, 991-997). Briefly, to conduct mouse studies, a single intravenous bolus (e.g., 5 mg/kg) of either pH-engineered ABPC specific for MET or control ABPC specific for MET is administered via tail vein to two groups of NOD SCID mice (e.g. Jackson Labs NOD.CB17-Prkdcscid/J Stock No: 001303) xenografted with a MET+ cell line (e.g., as described herein). Xenografted mice are prepared by growing 1-5 million MET+ cells in vitro and inoculating subcutaneously into the right flank of the mouse. Tumors are size matched at 300 mm3. Measurements of the length (L) and width (W) of the tumors are taken via electronic caliper and the volume is calculated according to the following equation: V=L×W\hat{ }2/2. Blood samples are collected via retro-orbital bleeds from each group at each of the following time points: 15 m, 30 m, 1 h, 8 h, 24 h, and 3 d, 7 d, 10 d, 14 d, 17 d, 21 d, and 28 d. Samples are processed to collect serum, and antibody concentrations are quantified using ELISA or other methods known to the art (e.g., PAC assay or MAC assay; Fischer, S. K. et al. (2012), mAbs, 4:5, 623-631, utilizing, e.g., anti-human IgG antibody Jackson ImmunoResearch Labs, Cat #109-006-006). Antibody concentrations of pH-engineered ABPC specific for MET and control ABPC specific for MET are plotted as a function of time. Upon analysis of the data, it can be observed that the pH-engineered ABPC specific for MET has a significantly shorter serum half-life relative to control ABPC specific for MET, thereby demonstrating the ability of the pH-engineered ABPC specific for MET's pH dependence to facilitate an enhanced dissociation within the endosome or lysosome relative to other, similar binders (e.g., control ABPC specific for MET) that bind the same antigen but that differ in their pH dependence. If the pH-engineered and control ABPCs specific for MET are cross-reactive with the mouse homolog of MET, a similar experiment can be repeated with non-xenografted mice.

[1057] Optionally, if the pH-engineered and control ABPCs specific for MET are cross-reactive with the cynomolgus monkey homolog of MET, a similar experiment can be performed on monkeys (e.g., cynomolgus monkeys). An equal number of male and female monkeys (e.g., n=1-2 each) are administered a bolus of either pH-engineered ABPC specific for MET or control ABPC specific for MET at a dose of, e.g., 1 mg/kg via saphenous vein injection. Alternatively, several different doses of MET-binding protein are administered across a group of several monkeys. Blood samples are collected via the peripheral vein or femoral vein at intervals similar to those described above, and analyzed for the presence of either pH-engineered ABPC specific for MET or control ABPC specific for MET using methods known to the art (e.g., ELISA). Upon analysis of the data, it can be observed that pH-engineered ABPC specific for MET has a significantly shorter serum half-life relative to control ABPC specific for MET, thereby demonstrating the ability of pH-engineered ABPC specific for MET to facilitate an enhanced dissociation within the endosome or lysosome relative to other, similar binders (e.g., control ABPC specific for MET) that bind the same antigen but that differ in their pH dependence. In some cases, this effect is observed only in certain doses, whereas in others it is observed across doses.

[1058] In addition, the half life of pH-engineered and control ABPC ADCs specific for MET can be assessed using the above methods by substituting pH-engineered and control ABPC ADCs specific for MET for the pH-engineered and control ABPCs specific for MET (i.e., studying the ABPCs after conjugation to a drug or toxin, as described herein).

### Example 7. Increased Potency of pH-Engineered ADCs Specific for MET Vs. a Control ABPC ADC Specific for MET in Mouse Xenograft Models

[1059] The enhanced anti-tumor activity of the pH-engineered ADCs specific for MET against MET+ tumors can be demonstrated in a subcutaneous xenograft model of MET+ cells. For the experiments, 1-5 million MET+ cells are grown in vitro and inoculated subcutaneously per mouse into the right flank of female immunodeficient (e.g., SCID-Beige or NOD scid) mice. Tumors are size matched at 100-200 mm3, and dosed intraperitoneally (IP) (1 dose given every ˜4-7 days for a total of ˜2-6 doses). Measurements of the length (L) and width (W) of the tumors are taken via electronic caliper and the volume is calculated according to the following equation: V=L×W\hat{ }2/2. A bolus (e.g., 5 mg/kg) of either pH-engineered ADC specific for MET or control ABPC ADC specific for MET is administered via tail vein. Tumor growth inhibition (TGD and tumor growth delay (TGD) and survival are significantly improved with administration of pH-engineered ADC specific for MET compared to administration of control ABPC ADC specific for MET at the same regimen.

[1060] Optionally, spread of tumor cells into the various tissues is determined in sacrificed animals. Metastasis is measured according to Schneider, T., et al., Clin. Exp. Metas. 19 (2002) 571-582. Briefly, tissues are harvested and human Alu sequences are quantified by real-time PCR. Higher human DNA levels, quantified by real-time PCR, correspond to higher levels of metastasis. Levels of human Alu sequences (correlating to invasion of tumor cells into secondary tissue) are significantly lower in animals treated with pH-engineered ADC specific for MET, corresponding to reduced metastasis, compared to mice treated with control ABPC ADC specific for MET at the same regimen. Alternatively, the enhanced anti-tumor activity of the pH-engineered ADC specific for MET can be shown in MET+ patient-derived xenograft models (e.g., available from The Jackson Laboratory).

### Example 8. Creation of a pH-Engineered Bispecific MET Bispecific ABPC and Demonstration of Exemplary Properties as Compared to a Control Bispecific ABPC

[1061] To create a pH-engineered ABPC specific for MET with modified toxicity and internalization properties, a bispecific antibody that binds two different epitopes on MET is constructed. It is known in the art that biparatopic antibodies can show increased antigen-dependent internalization, and are therefore useful for applications such as antibody-drug conjugates (e.g., see Li et al (2016) A Biparatopic HER2-Targeting Antibody-Drug Conjugate Induces Tumor Regression in Primary Models Refractory to or Ineligible for HER2-Targeted Therapy, Cancer Cell 29:117-29). Briefly, a pH-engineered MET×MET bispecific, biparatopic ABPC specific for MET is assembled using light chain/heavy chain pairs from two different pH-engineered ABPCs specific for MET, each of which binds a distinct epitope on MET that does not overlap with the other epitope. A set of pH-engineered ABPCs specific for MET that bind non-overlapping epitopes are discovered, e.g., using the methods described herein, or others known to one of ordinary skill in the art. Briefly, two binders are selected on the basis that they bind substantially different epitopes on MET, as determined by, e.g., a binding competition assay as in Abdiche Y N et al (2009) Exploring blocking assays using Octet, ProteOn, and Biacore biosensors, Anal Biochem 386:172-80. Alternatively, briefly, as described in herein, cell culture supernatants of cells transfected with a first ABPC specific for MET are normalized to an antibody expression level of 50 μg/mL, and captured on an anti-human Fc sensor (Forte Bio). A baseline is established using 1× kinetics buffer (Forte Bio), and the sensor is associated with 50 nM of MET in 1×PBS (that has been mixed and pre-incubated for 30 min at 37 degrees C. with a second ABPC specific for MET transfection supernatant or the first ABPC specific for MET transfection supernatant, both normalized to 50 ug/mL) at pH 7.4 for 300 sec to generate an association curve. If the association rate in the presence of the second ABPC specific for MET is significantly faster (as calculated by the instrument software, or as seen by an elevated level of association over time) than the association rate in the presence of the first ABPC specific for MET, then the second ABPC specific for MET is deemed to bind a non-overlapping epitope of MET. Optionally, each antibody is screened for its internazation properties when bound to its epitope on a cell expressing MET, and well-internalizing antibodies are selected. Assays for determining the internalization rate of a molecule present on the surface of a cell are known to the art. See, e.g., Wiley et al. (1991) J. Biol. Chem. 266: 11083-11094; and Sorkin and Duex (2010) Curr. Protoc. Cell Biol. Chapter, Unit-15.14; Vainshtein et al. (2015) Pharm Res. 32: 286-299. Once selected, heavy and light chain constructs with engineered mutations for heavy and light chain pairing (Spiess et al., “Alternative molecular formats and therapeutic applications of bispecific antibodies,” 2015) are synthesized for both arms. Bispecific ABPCs specific for MET are produced by co-expression of corresponding heavy and light chain plasmids in, e.g., Expi293 cells. Cell culture supernatants are harvested and subjected to Protein A purification. Heterodimeric ABPCs specific for MET are separated from homodimeric species via additional purification steps such as ion exchange chromatography, hydrophobic interaction chromatography, and mixed mode chromatography. The purified pH-engineered MET×MET bispecific, biparatopic ABPCs specific for MET are characterized via mass spectrometry to confirm the purity and absence of homodimeric species and size exclusion chromatography to confirm the presence of monomeric antigen-binding protein construct species. For the product antibody, binding to the MET is confirmed via Biacore analysis. Other methods of bispecific antibody production are known to the art and could also be used to create a bispecific antibody, e.g., the MET×MET bispecific, biparatopic ABPCs specific for MET described herein (e.g., Labrijn et al (2014) “Controlled Fab-arm exchange for the generation of stable bispecific IgG1” Nature Protcols 9:2450-2463, accessed at http://www.nature.com/nprot/journal/v9/n10/abs/nprot.2014.169.html), as would be apparent to one of ordinary skill in the art. Alternatively, instead of a MET×MET ABPC specific for MET, a pH-engineered MET×BINDER ABPC specific for MET can be constructed using similar methods apparent to one skilled in the art, where BINDER is any antibody that has been published in the art or discovered using methods like those herein or those known in the art (e.g., display-based or immunization-based methods).

[1062] Next, exemplary properties of pH-engineered MET×MET ABPCs specific for MET can be demonstrated using the methods described herein, with the appropriate control being a control ABPC monospecific or bispecific ABPC specific for MET. Briefly, it can be shown that, as compared to a control, the pH-engineered MET×MET ABPCs specific for MET: a) bind in a pH-dependent manner to cells, e.g., bind at a neutral pH but not an acidic pH and b) release from cells in a pH-dependent manner, e.g. bind at a neutral pH and release at an acidic pH and c) show enhanced endolysosomal accumulation in MET+ cells and d) show increased MET antigen density after exposure to MET+ cells and e) when conjugated to a toxin, show increased cytotoxicity to MET+ cells and f) when conjugated to a toxin, show increased toxin liberation when incubated with MET+ cells and g) show decreased half life when exposed to MET antigen in a relevant animal model and h) when conjugated to a toxin, show increased efficacy in a mouse xenograft model of MET+ cells. Similarly, the exemplary properties of pH-engineered MET×BINDER ABPCs specific for MET can be demonstrated using the methods described herein, with the appropriate control being a control ABPC MET×BINDER bispecific ABPC specific for MET.

### Example 9. Construction and Screening of pH-Engineered MET ABPCs

[1063] Multiple MET-binding monoclonal antibodies have been described in the literature and can be used as a template for engineering pH-dependent binding [Wang J et al (2017) ABBV-399, a c-Met Antibody-Drug Conjugate that Targets Both MET-Amplified and c-Met-Overexpressing Tumors, Irrespective of MET Pathway Dependence, Clin Cancer Res, 23:992-1000]. We selected Telisotuzumab (Heavy chain SEQ ID NO: 1, Light chain SEQ ID NO: 2) as a MET-binding monoclonal antibody for pH engineering via histidine scanning. Briefly, CDRs in the heavy chain were identified using the methods described by Kabat et al (Kabat et al. (1992) Sequences of Proteins of Immunological Interest, DIANE publishing) and IMGT (Lefranc M P (1999) “The IMGT unique numbering for Immunoglobulins, T cell receptors and Ig-like domains” The Immunologist 7, 132-136), and for each CDR, residues falling under either or both Kabat and IMGT CDR definitions were called as CDR residues. To generate pH-dependent sequence variants, individual amino acid residues within the heavy chain CDRs were systematically substituted with a histidine, one at a time (MYT0887-MYT0924). In cases where the starting CDR residue was a histidine, it was mutated to an alanine. Antibody variants with only one histidine or alanine mutation in a heavy chain CDR were generated by co-transfection of Expi293 cells with a) one heavy chain sequence variant, and b) the corresponding starting ABPC light chain using methods known to the art. After allowing for four days of protein expression, cell culture supernatants were collected, quantified by SDS-PAGE analysis (FIG. 1), and the pH dependence of the variant was evaluated using biolayer interferometry (BLI) on an Octet RED 384 instrument. Briefly, 15 μL of cell culture supernatant was diluted into 185 μL of 1×PBST pH 7.4 for loading onto the sensor tips. This resulted in a high concentration of 41.1 μg/mL, a low concentration of 13.7 μg/mL and an average concentration of 26.5 μg/mL. This diluted supernatant was then captured on an anti-human Fc sensor (Forte Bio). A baseline was established using 1×PBST (50 mM Potassium Phosphate Buffer+150 mM NaCl+0.05% Tween 20) pH 7.4, and the sensor was associated with 50 nM of MET (cMET, Sino Biological Cat. No. 10692-H08H, Lot No. LC11SE2008) in 1×PBST pH 7.4 for 120 sec to generate an association curve. In the dissociation phase, the antibody-antigen complex on the sensor was exposed to 1×PBST pH 7.4 for 300-600 sec. Baseline, association, and dissociation were repeated using 1×PBST pH 5.4 throughout in a separate condition. Association and dissociation phase curves were examined for the starting ABPC antibody (with no substitutions) and each corresponding antibody variant at pH 5.4 and pH 7.4 to inform on two criteria: a) enhanced dissociation (i.e., higher koff values) at pH 5.4 due to histidine or alanine substitution compared to the starting ABPC, (with no substitutions), and b) reduced dissociation at pH 7.4 (i.e., lower koff values) compared to pH 5.4 in the antibody variant itself and with the starting ABPC (with no substitutions). Heavy chain variants that showed either enhanced dissociation at pH 5.4 or reduced dissociation at pH 7.4 or both (as compared to the starting ABPC), as shown in FIG. 2 were selected for further analysis (e.g, MYT0887, MYT0888, MYT0889, MYT0890, MYT0893, MYT0914, MYT0915, MYT0916, MYT0917, MYT0918, MYT0919, MYT0920, and MYT0924). It was also noted that while some histidine and alanine mutations obliterated MET binding (e.g., MYT0921 and MYT0923), others were tolerated with little (e.g., less than 1-fold change in dissociation constant K_{D} or dissociation rate) or no change in MET binding kinetics (e.g., MYT0891, MYT0894, MYT0895, MYT0896, MYT0897, MYT0898, MYT0899, MYT0900, MYT0901, MYT0902, MYT0903, MYT0904, MYT0905, MYT0906, MYT0907, MYT0908, MYT0909, MYT0910, MYT0911, MYT0912, MYT0913, and MYT0922).

[1064] Especially because histidine is a large, positively charged amino acid, these variants with no change were noted as positions in the heavy chain that may tolerate a wide range of mutations and lead to antibodies with different sequence but similar binding properties, a designation that is not otherwise apparent.

### Example 10. Construction and Screening of pH-Engineered MET ABPCs

[1065] Multiple MET-binding monoclonal antibodies have been described in the literature and can be used as a template for engineering pH-dependent binding [Wang J et al (2017) ABBV-399, a c-Met Antibody-Drug Conjugate that Targets Both MET-Amplified and c-Met-Overexpressing Tumors, Irrespective of MET Pathway Dependence, Clin Cancer Res, 23:992-1000]. We selected Telisotuzumab (Heavy chain SEQ ID NO: 1, Light chain SEQ ID NO: 2) as a MET-binding monoclonal antibody for pH engineering via histidine scanning. Briefly, CDRs in the light chain were identified using the methods described by Kabat et al (Kabat et al. (1992) Sequences of Proteins of Immunological Interest, DIANE publishing) and IMGT (Lefranc M P (1999) “The IMGT unique numbering for Immunoglobulins, T cell receptors and Ig-like domains” The Immunologist 7, 132-136), and for each CDR, residues falling under either or both Kabat and IMGT CDR definitions were called as CDR residues. To generate pH-dependent sequence variants, individual amino acid residues within the light chain CDRs were systematically substituted with a histidine, one at a time (MYT2028-MYT2058). In cases where the starting CDR residue was a histidine, it was mutated to an alanine. Antibody variants with only one histidine or alanine mutation in a light chain CDR were generated by co-transfection of Expi293 cells with a) one light chain sequence variant, and b) the corresponding starting ABPC heavy chain using methods known to the art. After allowing for four days of protein expression, cell culture supernatants were collected, quantified by SDS-PAGE analysis (FIG. 3), and the pH dependence of the variant was evaluated using biolayer interferometry (BLI) on an Octet RED 96e instrument. Briefly, cell culture supernatants were diluted based on qualitative expression level of the variant determined by visual examination of SDS-PAGE gels, 5 μL of cell culture supernatant was diluted into 195 μL of 1×PBST, pH 7.4 for high expressors, 25 μL of cell culture supernatant was diluted into 175 μL of 1×PBST, pH 7.4 for medium expressors and 100 μL of cell culture supernatant was diluted into 100 μL of 1×PBST, pH 7.4 for low expressors for loading onto the sensor tips. Diluted supernatants were then captured on an anti-human Fc sensor (Forte Bio). A baseline was established using 1×PBST (50 mM Potassium Phosphate Buffer+150 mM NaCl+0.05% Tween 20) pH 7.4, and the sensor was associated with 50 nM of MET (cMET, Sino Biological Cat. No. 10692-H08H) in 1×PBST pH 7.4 for 120 sec to generate an association curve. In the dissociation phase, the antibody-antigen complex on the sensor was exposed to 1×PBST pH 7.4 for 300-600 sec. Baseline, association, and dissociation were repeated using 1×PBST pH 5.4 throughout in a separate condition. Association and dissociation phase curves were examined for the starting ABPC antibody (with no substitutions) and each corresponding antibody variant at pH 5.4 and pH 7.4 to inform on two criteria: a) enhanced dissociation (i.e., higher koff values) at pH 5.4 due to histidine or alanine substitution compared to the starting ABPC (with no substitutions), and b) reduced dissociation at pH 7.4 (i.e., lower koff values) compared to pH 5.4 in the antibody variant itself and with the starting ABPC (with no substitutions). Light chain variants that showed either enhanced dissociation at pH 5.4 or reduced dissociation at pH 7.4 or both (as compared to the starting ABPC), as shown in FIG. 4 were selected for further analysis (e.g, MYT2029, MYT2032, MYT2033, MYT2034, MYT2035, MYT2036, MYT2038, MYT2039, MYT2040, MYT2041, MYT2042, MYT2043, MYT2044, MYT2048, MYT2049, MYT2052, MYT2056, and MYT2058). It was also noted that some histidine and alanine mutations were tolerated with little (e.g., less than 1-fold change in dissociation constant KD or dissociation rate) or no change in MET binding kinetics (e.g., MYT2028, MYT2030, MYT2031, MYT2037, MYT2045, MYT2046, MYT2047, MYT2050, MYT2051, MYT2053, MYT2054, MYT2055, and MYT2057). Especially because histidine is a large, positively charged amino acid, these variants with no change were noted as positions in the light chain that may tolerate a wide range of mutations and lead to antibodies with different sequence but similar binding properties, a designation that is not otherwise apparent.

### Example 11. Construction and Screening of pH-Engineered MET ABPCs

[1066] Multiple MET-binding monoclonal antibodies have been described in the literature and can be used as a template for engineering pH-dependent binding [Wang J et al (2017) ABBV-399, a c-Met Antibody-Drug Conjugate that Targets Both MET-Amplified and c-Met-Overexpressing Tumors, Irrespective of MET Pathway Dependence, Clin Cancer Res, 23:992-1000]. We selected Telisotuzumab (Heavy chain SEQ ID NO: 1, Light chain SEQ ID NO: 2) as a MET-binding monoclonal antibody for pH engineering via histidine scanning. Briefly, CDRs in the heavy chain were identified using the methods described by Kabat et al (Kabat et al. (1992) Sequences of Proteins of Immunological Interest, DIANE publishing) and IMGT (Lefranc M P (1999) “The IMGT unique numbering for Immunoglobulins, T cell receptors and Ig-like domains” The Immunologist 7, 132-136), and for each CDR, residues falling under either or both Kabat and IMGT CDR definitions were called as CDR residues. To generate pH-dependent sequence variants, individual amino acid mutations within the heavy chain CDRs that had been previously selected for further analysis in Example 9 were systematically combined two or more at a time (MYT2018-MYT2027). In cases where the starting CDR residue was a histidine, it was mutated to an alanine. Antibody variants with two or more histidine or alanine mutations in the heavy chain CDRs were generated by co-transfection of Expi293 cells with a) one heavy chain combinations sequence variant, and b) the corresponding starting ABPC light chain using methods known to the art. After allowing for four days of protein expression, cell culture supernatants were collected, quantified by SDS-PAGE analysis (FIG. 5), and the pH dependence of the variant was evaluated using biolayer interferometry (BLI) on an Octet RED 96e instrument. Briefly, cell culture supernatants were diluted based on qualitative expression level of the variant determined by visual examination of SDS-PAGE gels, 5 μL of cell culture supernatant was diluted into 195 μL of 1×PBST, pH 7.4 for high expressors, 25 μL of cell culture supernatant was diluted into 175 μL of 1×PBST, pH 7.4 for medium expressors and 100 μL of cell culture supernatant was diluted into 100 μL of 1×PBST, pH 7.4 for low expressors for loading onto the sensor tips. Diluted supernatants were then captured on an anti-human Fc sensor (Forte Bio). A baseline was established using 1×PBST (50 mM Potassium Phosphate Buffer+150 mM NaCl+0.05% Tween 20) pH 7.4, and the sensor was associated with 50 nM of MET (cMET, Sino Biological Cat. No. 10692-H08H)) in 1×PBST pH 7.4 for 120 sec to generate an association curve. In the dissociation phase, the antibody-antigen complex on the sensor was exposed to 1×PBST pH 7.4 for 300-600 sec. Baseline, association, and dissociation were repeated using 1×PBST pH 5.4 throughout in a separate condition. Association and dissociation phase curves were examined for the starting ABPC antibody (with no substitutions) and each corresponding antibody variant at pH 5.4 and pH 7.4 to inform on two criteria: a) enhanced dissociation (i.e., higher koff values) at pH 5.4 due to histidine or alanine substitution compared to the starting ABPC (with no substitutions), and b) reduced dissociation at pH 7.4 (i.e., lower koff values) compared to pH 5.4 in the antibody variant itself and with the starting ABPC (with no substitutions). Heavy chain combinations variants that showed either enhanced dissociation at pH 5.4 or reduced dissociation at pH 7.4 or both (as compared to the starting ABPC), as shown in FIG. 6 were selected for further analysis (e.g, MYT2018, MYT2019, MYT2020, MYT2022, MYT2023, MYT2025, and MYT2026).

### Example 12. Construction and Screening of pH-Engineered MET ABPCs

[1067] Multiple MET-binding monoclonal antibodies have been described in the literature and can be used as a template for engineering pH-dependent binding [Wang J et al (2017) ABBV-399, a c-Met Antibody-Drug Conjugate that Targets Both MET-Amplified and c-Met-Overexpressing Tumors, Irrespective of MET Pathway Dependence, Clin Cancer Res, 23:992-1000]. We selected Telisotuzumab (Heavy chain SEQ ID NO: 1, Light chain SEQ ID NO: 2) as a MET-binding monoclonal antibody for pH engineering via histidine scanning. Briefly, CDRs in the light chain were identified using the methods described by Kabat et al (Kabat et al. (1992) Sequences of Proteins of Immunological Interest, DIANE publishing) and IMGT (Lefranc M P (1999) “The IMGT unique numbering for Immunoglobulins, T cell receptors and Ig-like domains” The Immunologist 7, 132-136), and for each CDR, residues falling under either or both Kabat and IMGT CDR definitions were called as CDR residues. To generate pH-dependent sequence variants, individual amino acid mutations within the light chain CDRs that had been previously selected for further analysis in Example 10 were systematically combined two or more at a time (MYT4201-MYT4210). In cases where the starting CDR residue was a histidine, it was mutated to an alanine. Antibody variants with two or more histidine or alanine mutations in the light chain CDRs were generated by co-transfection of Expi293 cells with a) one light chain combinations sequence variant, and b) the corresponding starting ABPC heavy chain using methods known to the art. After allowing for four days of protein expression, cell culture supernatants were collected, quantified by SDS-PAGE analysis (FIG. 7), and the pH dependence of the variant was evaluated using biolayer interferometry (BLI) on an Octet RED 96e instrument. Briefly, cell culture supernatants were diluted based on qualitative expression level of the variant determined by visual examination of SDS-PAGE gels, 5 μL of cell culture supernatant was diluted into 195 μL of 1×PBST, pH 7.4 for high expressors, 25 μL of cell culture supernatant was diluted into 175 μL of 1×PBST, pH 7.4 for medium expressors and 100 μL of cell culture supernatant was diluted into 100 μL of 1×PBST, pH 7.4 for low expressors for loading onto the sensor tips. Diluted supernatants were then captured on an anti-human Fc sensor (Forte Bio). A baseline was established using 1×PBST (50 mM Potassium Phosphate Buffer+150 mM NaCl+0.05% Tween 20), pH 7.4, and the sensor was associated with MET (cMET, Sino Biological Cat. No. 10692-H08H) in 1×PBST, pH 7.4, for 120 sec to generate an association curve. In the dissociation phase, the antibody-antigen complex on the sensor was exposed to 1×PBST, pH 7.4, for 300-600 sec. Baseline, association, and dissociation were repeated using 1×PBST, pH 5.4, throughout in a separate condition. Association and dissociation phase curves were examined for the starting ABPC antibody (with no substitutions) and each corresponding antibody variant at pH 5.4 and pH 7.4 to inform on two criteria: a) enhanced dissociation (e.g., higher koff values) at pH 5.4 due to histidine or alanine substitution compared to the starting ABPC (with no substitutions), and b) reduced dissociation at pH 7.4 (e.g., lower koff values) compared to pH 5.4 in the antibody variant itself and with the starting ABPC (with no substitutions). Light chain combinations variants that showed either enhanced dissociation at pH 5.4 or reduced dissociation at pH 7.4 or both (as compared to the starting ABPC), as shown in FIG. 8 were selected for further analysis (MYT4201, MYT4202, MYT4203, MYT4204, MYT4205, MYT4206, MYT4207, MYT4208, MYT4209, and MYT4210).

### Example 13. Construction and Screening of pH-Engineered MET ABPCs

[1068] Multiple MET-binding monoclonal antibodies have been described in the literature and can be used as a template for engineering pH-dependent binding [Wang J et al (2017) ABBV-399, a c-Met Antibody-Drug Conjugate that Targets Both MET-Amplified and c-Met-Overexpressing Tumors, Irrespective of MET Pathway Dependence, Clin Cancer Res, 23:992-1000]. We selected Telisotuzumab (Heavy chain SEQ ID NO: 1, Light chain SEQ ID NO: 2) as a MET-binding monoclonal antibody for pH engineering via histidine scanning. Briefly, CDRs in the heavy and light chains were identified using the methods described by Kabat et al (Kabat et al. (1992) Sequences of Proteins of Immunological Interest, DIANE publishing) and IMGT (Lefranc M P (1999) “The IMGT unique numbering for Immunoglobulins, T cell receptors and Ig-like domains” The Immunologist 7, 132-136), and for each CDR, residues falling under either or both Kabat and IMGT CDR definitions were called as CDR residues. To generate pH-dependent sequence variants, individual amino acid mutations within the heavy and light chain CDRs that had been previously selected for further analysis in Examples 9-12 were systematically combined two or more at a time (MYT3451-MYT3492, MYT3603-MYT3616, and MYT4211-MYT4220). In cases where the starting CDR residue was a histidine, it was mutated to an alanine. Antibody variants with two or more histidine or alanine mutations were generated by co-transfection of Expi293 cells with a) one light chain sequence variant or light chain combinations sequence variant, and b) one heavy chain sequence variant or heavy chain combinations sequence variant using methods known to the art. After allowing for four days of protein expression, cell culture supernatants were collected, quantified by SDS-PAGE analysis (FIG. 9), and the pH dependence of the variant was evaluated using biolayer interferometry (BLI) on an Octet RED 96e instrument. Briefly, cell culture supernatants were diluted based on qualitative expression level of the variant determined by visual examination of SDS-PAGE gels, 5 μL of cell culture supernatant was diluted into 195 μL of 1×PBST, pH 7.4 for high expressors, 25 μL of cell culture supernatant was diluted into 175 μL of 1×PBST, pH 7.4 for medium expressors and 100 μL of cell culture supernatant was diluted into 100 μL of 1×PBST, pH 7.4 for low expressors for loading onto the sensor tips. Diluted supernatants were then captured on an anti-human Fc sensor (Forte Bio). A baseline was established using 1×PBST (50 mM Potassium Phosphate Buffer+150 mM NaCl+0.05% Tween 20), pH 7.4, and the sensor was associated with 50 nM of MET (cMET, Sino Biological Cat. No. 10692-H08H) in 1×PBST, pH 7.4, for 120 sec to generate an association curve. In the dissociation phase, the antibody-antigen complex on the sensor was exposed to 1×PBST, pH 7.4, for 300-600 sec. Baseline, association, and dissociation were repeated using 1×PBST, pH 5.4, throughout in a separate condition. Association and dissociation phase curves were examined for the starting ABPC antibody (with no substitutions) and each corresponding antibody variant at pH 5.4 and pH 7.4 to inform on two criteria: a) enhanced dissociation (e.g., higher koff values) at pH 5.4 due to histidine or alanine substitution compared to the starting ABPC (with no substitutions), and b) reduced dissociation at pH 7.4 (e.g., lower koff values) compared to pH 5.4 in the antibody variant itself and with the starting ABPC (with no substitutions). Paired heavy and light chain variants that showed either enhanced dissociation at pH 5.4 or reduced dissociation at pH 7.4 or both (as compared to the starting ABPC), as shown in FIG. 10, were selected for further analysis (MYT3451, MYT3452, MYT3453, MYT3454, MYT3455, MYT3456, MYT3457, MYT3459, MYT3460, MYT3463, MYT3465, MYT3466, MYT3467, MYT3468, MYT3469, MYT3471, MYT3473, MYT3474, MYT3476, MYT3477, MYT3479, MYT3480, MYT3481, MYT3482, MYT3483, MYT3484, MYT3485, MYT3487, MYT3488, MYT3491, MYT3603, MYT3604, MYT3605, MYT3606, MYT3607, MYT3608, MYT3609, MYT3610, MYT3611, MYT3612, MYT3614, MYT3615, MYT4211, MYT4212, MYT4214, MYT4217, and MYT4220).

### Example 14. Construction and Screening of pH-Engineered MET ABPCs

[1069] Multiple MET-binding monoclonal antibodies have been described in the literature and can be used as a template for engineering pH-dependent binding [Wang J et al (2017) ABBV-399, a c-Met Antibody-Drug Conjugate that Targets Both MET-Amplified and c-Met-Overexpressing Tumors, Irrespective of MET Pathway Dependence, Clin Cancer Res, 23:992-1000]. We selected Telisotuzumab (Heavy chain SEQ ID NO: 1, Light chain SEQ ID NO: 2) as a MET-binding monoclonal antibody for pH engineering via histidine scanning. Briefly, CDRs in the heavy chain were identified using the methods described by Kabat et al (Kabat et al. (1992) Sequences of Proteins of Immunological Interest, DIANE publishing) and IMGT (Lefranc M P (1999) “The IMGT unique numbering for Immunoglobulins, T cell receptors and Ig-like domains” The Immunologist 7, 132-136), and for each CDR, residues falling under either or both Kabat and IMGT CDR definitions were called as CDR residues. To generate pH-dependent sequence variants, individual amino acid mutations within the heavy chain CDRs that had been previously selected for further analysis in Example 9 were systematically combined two or more at a time (MYT4951-MYT4989). In cases where the starting CDR residue was a histidine, it was mutated to an alanine. Antibody variants with two or more histidine or alanine mutations in the heavy chain CDRs were generated by co-transfection of Expi293 cells with a) one heavy chain combinations sequence variant containing the triple hinge (TH) and YTE mutations described in (Wang J et al (2017) ABBV-399, a c-Met Antibody-Drug Conjugate that Targets Both MET-Amplified and c-Met-Overexpressing Tumors, Irrespective of MET Pathway Dependence, Clin Cancer Res, 23:992-1000) and (Dail, W F et al “Increasing the Affinity of a Human IgG1 for the Neonatal Fc Receptor: Biological Consequences” The Journal of Immunology (2002); 169:5171-5180) respectively, and b) the corresponding starting ABPC light chain using methods known to the art. After allowing for four days of protein expression, cell culture supernatants were collected, quantified by SDS-PAGE analysis (FIG. 11), purified using protein A magnetic beads (Genscript L00273), and evaluated for endolysosomal delivery on Detroit 562 cells (ATCC CCL-138). Detroit 562 cells (ATCC; CCL-138) were collected and resuspended in EMEM medium (ATCC; 30-2003)+10% GenClone heat inactivated fetal bovine serum (HI FBS) (Genesee Scientific; 25-514H). Cell counts were determined using trypan blue staining and the Countess II FL Automated Cell Counter (Thermofisher; AMQAF1000). Cells were then diluted to 100,000 cells/mL and 100 ul was seeded into 96-well flat bottom cell culture plates and allowed to attach overnight in 37 C 5% CO2. Primary antibodies were then diluted in native culture mediums to 20 nM and then mixed 1:1 with 60 nM Incucyte Human FabFluor-pH Red Antibody Labeling Reagent (Sartorius; 4722). The mixture was incubated for 20 minutes at room temperature, followed by addition to cells. Plates were then placed immediately into the Incucyte S3 Live-Cell Analysis System for image acquisition and analysis. Endolysosomal delivery was examined for the starting ABPC antibody (with no substitutions) and each corresponding antibody variant to inform on enhanced endolysosomal delivery due to histidine or alanine substitution compared to the starting ABPC (with no substitutions). Heavy chain combinations variants that showed enhanced endolysosomal delivery (as compared to the starting ABPC), as shown in FIG. 12, were selected for further analysis (e.g, MYT4953 and MYT4970). The pH dependence of the selected variants were evaluated using biolayer interferometry (BLI) on an Octet RED 96e instrument. Briefly, cell culture supernatants were diluted based on qualitative expression level of the variant determined by visual examination of SDS-PAGE gels, 5 μL of cell culture supernatant was diluted into 195 μL of 1×PBST, pH 7.4 for high expressors, 25 μL of cell culture supernatant was diluted into 175 μL of 1×PBST, pH 7.4 for medium expressors and 100 μL of cell culture supernatant was diluted into 100 μL of 1×PBST, pH 7.4 for low expressors for loading onto the sensor tips. Diluted supernatants were then captured on an anti-human Fc sensor (Forte Bio). A baseline was established using 1×PBST (50 mM Potassium Phosphate Buffer+150 mM NaCl+0.05% Tween 20), pH 7.4, and the sensor was associated with MET (cMET, Sino Biological Cat. No. 10692-H08H) in 1×PBST, pH 7.4, for 120 sec to generate an association curve. In the dissociation phase, the antibody-antigen complex on the sensor was exposed to 1×PBST, pH 7.4 or pH 5.4, for 300-600 sec. Association and dissociation phase curves at pH 7.4 and pH 5.4 were examined for the starting ABPC antibody (with no substitutions) and each corresponding antibody variant to inform on two criteria: a) enhanced dissociation (e.g., higher koff values) at pH 5.4 due to histidine or alanine substitution compared to the starting ABPC (with no substitutions), and b) reduced dissociation at pH 7.4 (e.g., lower koff values) compared to pH 5.4 in the antibody variant itself and with the starting ABPC (with no substitutions). Heavy chain combinations variants that showed either enhanced dissociation at pH 5.4 or reduced dissociation at pH 7.4 or both (as compared to the starting ABPC), as shown in FIG. 13 were selected for further analysis (e.g, MYT4953 and MYT4970).

### Example 15. Construction and Screening of pH-Engineered MET ABPCs

[1070] Multiple MET-binding monoclonal antibodies have been described in the literature and can be used as a template for engineering pH-dependent binding [Wang J et al (2017) ABBV-399, a c-Met Antibody-Drug Conjugate that Targets Both MET-Amplified and c-Met-Overexpressing Tumors, Irrespective of MET Pathway Dependence, Clin Cancer Res, 23:992-1000]. We selected Telisotuzumab (Heavy chain SEQ ID NO: 1, Light chain SEQ ID NO: 2) as a MET-binding monoclonal antibody for pH engineering via histidine scanning. Briefly, CDRs in the light chain were identified using the methods described by Kabat et al (Kabat et al. (1992) Sequences of Proteins of Immunological Interest, DIANE publishing) and IMGT (Lefranc M P (1999) “The IMGT unique numbering for Immunoglobulins, T cell receptors and Ig-like domains” The Immunologist 7, 132-136), and for each CDR, residues falling under either or both Kabat and IMGT CDR definitions were called as CDR residues. To generate pH-dependent sequence variants, individual amino acid mutations within the light chain CDRs that had been previously selected for further analysis in Example 10 were systematically combined two or more at a time (MYT4990-4994). In cases where the starting CDR residue was a histidine, it was mutated to an alanine. Antibody variants with two or more histidine or alanine mutations in the light chain CDRs were generated by co-transfection of Expi293 cells with a) one light chain combinations sequence variant, and b) the corresponding starting ABPC heavy chain containing the triple hinge (TH) and YTE mutations described in (Wang J et al (2017) ABBV-399, a c-Met Antibody-Drug Conjugate that Targets Both MET-Amplified and c-Met-Overexpressing Tumors, Irrespective of MET Pathway Dependence, Clin Cancer Res, 23:992-1000) and (Dall, W F et al “Increasing the Affinity of a Human IgG1 for the Neonatal Fc Receptor: Biological Consequences” The Journal of Immunology (2002); 169:5171-5180) respectively using methods known to the art. After allowing for four days of protein expression, cell culture supernatants were collected, quantified by SDS-PAGE analysis (FIG. 14), purified using protein A magnetic beads (Genscript L00273), and evaluated for endolysosomal delivery on Detroit 562 cells (ATCC CCL-138). Detroit 562 cells (ATCC; CCL-138) were collected and resuspended in EMEM medium (ATCC; 30-2003)+10% GenClone heat inactivated fetal bovine serum (HI FBS) (Genesee Scientific; 25-514H). Cell counts were determined using trypan blue staining and the Countess II FL Automated Cell Counter (Thermofisher; AMQAF1000). Cells were then diluted to 100,000 cells/mL and 100 ul was seeded into 96-well flat bottom cell culture plates and allowed to attach overnight in 37 C 5% CO2. Primary antibodies were then diluted in native culture mediums to 20 nM and then mixed 1:1 with 60 nM Incucyte Human FabFluor-pH Red Antibody Labeling Reagent (Sartorius; 4722). The mixture was incubated for 20 minutes at room temperature, followed by addition to cells. Plates were then placed immediately into the Incucyte S3 Live-Cell Analysis System for image acquisition and analysis. Endolysosomal delivery was examined for the starting ABPC antibody (with no substitutions) and each corresponding antibody variant to inform on enhanced endolysosomal delivery due to histidine or alanine substitution compared to the starting ABPC (with no substitutions).

### Example 16. Construction and Screening of pH-Engineered MET ABPCs

[1071] Multiple MET-binding monoclonal antibodies have been described in the literature and can be used as a template for engineering pH-dependent binding (Feng Y et al. “MET Antibody Drug Conjugate” US Patent Application US 2020/0061204 A1 (2020)). We selected Emibetuzumab (Heavy chain SEQ ID NO: 146, Light chain SEQ ID NO: 147) as a MET-binding monoclonal antibody for pH engineering via histidine scanning. Briefly, CDRs in the heavy chain were identified using the methods described by Kabat et al (Kabat et al. (1992) Sequences of Proteins of Immunological Interest, DIANE publishing) and IMGT (Lefranc M P (1999) “The IMGT unique numbering for Immunoglobulins, T cell receptors and Ig-like domains” The Immunologist 7, 132-136), and for each CDR, residues falling under either or both Kabat and IMGT CDR definitions were called as CDR residues. To generate pH-dependent sequence variants, individual amino acid residues within the heavy chain CDRs were systematically substituted with a histidine, one at a time (MYT2314-MYT2348). In cases where the starting CDR residue was a histidine, it was mutated to an alanine. Antibody variants with only one histidine or alanine mutation in a heavy chain CDR were generated by co-transfection of Expi293 cells with a) one heavy chain sequence variant, and b) the corresponding starting ABPC light chain using methods known to the art. After allowing for four days of protein expression, cell culture supernatants were collected, quantified by SDS-PAGE analysis (FIG. 22), and the pH dependence of the variant was evaluated using biolayer interferometry (BLI) on an Octet RED 96e instrument. Briefly, cell culture supernatants were diluted based on qualitative expression level of the variant determined by visual examination of SDS-PAGE gels, 5 μL of cell culture supernatant was diluted into 195 μL of 1×PBST, pH 7.4 for high expressors, 25 μL of cell culture supernatant was diluted into 175 μL of 1×PBST, pH 7.4 for medium expressors and 100 μL of cell culture supernatant was diluted into 100 μL of 1×PBST, pH 7.4 for low expressors for loading onto the sensor tips. This diluted supernatant was then captured on an anti-human Fc sensor (Forte Bio). A baseline was established using 1×PBST (50 mM Potassium Phosphate Buffer+150 mM NaCl+0.05% Tween 20) pH 7.4, and the sensor was associated with 50 nM of MET (cMET, Sino Biological Cat. No. 10692-H08H) in 1×PBST pH 7.4 for 120 sec to generate an association curve. In the dissociation phase, the antibody-antigen complex on the sensor was exposed to 1×PBST pH 7.4 for 300-600 sec. Baseline, association, and dissociation were repeated using 1×PBST pH 5.4 throughout in a separate condition. Association and dissociation phase curves were examined for the starting ABPC antibody (with no substitutions) and each corresponding antibody variant at pH 5.4 and pH 7.4 to inform on two criteria: a) enhanced dissociation (i.e., higher koff values) at pH 5.4 due to histidine or alanine substitution compared to the starting ABPC, (with no substitutions), and b) reduced dissociation at pH 7.4 (i.e., lower koff values) compared to pH 5.4 in the antibody variant itself and with the starting ABPC (with no substitutions). Heavy chain variants that showed either enhanced dissociation at pH 5.4 or reduced dissociation at pH 7.4 or both (as compared to the starting ABPC), as shown in FIG. 23 were selected for further analysis (e.g, MYT2319, MYT2324, MYT2325, MYT2326, MYT2327, MYT2328, MYT2330, MYT2331, MYT2333, MYT2342, MYT2343, MYT2344, and MYT2347). It was also noted that while some histidine and alanine mutations obliterated MET binding (e.g., MYT2341), others were tolerated with little (e.g., less than 1-fold change in dissociation constant KD or dissociation rate) or no change in MET binding kinetics (e.g., MYT2314, MYT2315, MYT2316, MYT2317, MYT2318, MYT2320, MYT2321, MYT2322, MYT2323, MYT2329, MYT2332, MYT2334, MYT2335, MYT2336, MYT2337, MYT2338, MYT2339, MYT2340, MYT2345, MYT2346, and MYT2348).

[1072] Especially because histidine is a large, positively charged amino acid, these variants with no change were noted as positions in the heavy chain that may tolerate a wide range of mutations and lead to antibodies with different sequence but similar binding properties, a designation that is not otherwise apparent.

### Example 17. Construction and Screening of pH-Engineered MET ABPCs

[1073] Multiple MET-binding monoclonal antibodies have been described in the literature and can be used as a template for engineering pH-dependent binding (Feng Y et al. “MET Antibody Drug Conjugate” US Patent Application US 2020/0061204 A1 (2020)). We selected Emibetuzumab (Heavy chain SEQ ID NO: 146, Light chain SEQ ID NO: 147) as a MET-binding monoclonal antibody for pH engineering via histidine scanning. Briefly, CDRs in the light chain were identified using the methods described by Kabat et al (Kabat et al. (1992) Sequences of Proteins of Immunological Interest, DIANE publishing) and IMGT (Lefranc M P (1999) “The IMGT unique numbering for Immunoglobulins, T cell receptors and Ig-like domains” The Immunologist 7, 132-136), and for each CDR, residues falling under either or both Kabat and IMGT CDR definitions were called as CDR residues. To generate pH-dependent sequence variants, individual amino acid residues within the light chain CDRs were systematically substituted with a histidine, one at a time (MYT3958-MYT3985). In cases where the starting CDR residue was a histidine, it was mutated to an alanine. Antibody variants with only one histidine or alanine mutation in a light chain CDR were generated by co-transfection of Expi293 cells with a) one light chain sequence variant, and b) the corresponding starting ABPC heavy chain using methods known to the art. After allowing for four days of protein expression, cell culture supernatants were collected, quantified by SDS-PAGE analysis (FIG. 24), and the pH dependence of the variant was evaluated using biolayer interferometry (BLI) on an Octet RED 96e instrument. Briefly, cell culture supernatants were diluted based on qualitative expression level of the variant determined by visual examination of SDS-PAGE gels, 5 μL of cell culture supernatant was diluted into 195 μL of 1×PBST, pH 7.4 for high expressors, 25 μL of cell culture supernatant was diluted into 175 μL of 1×PBST, pH 7.4 for medium expressors and 100 μL of cell culture supernatant was diluted into 100 μL of 1×PBST, pH 7.4 for low expressors for loading onto the sensor tips. Diluted supernatants were then captured on an anti-human Fc sensor (Forte Bio). A baseline was established using 1×PBST (50 mM Potassium Phosphate Buffer+150 mM NaCl+0.05% Tween 20) pH 7.4, and the sensor was associated with 50 nM of MET (cMET, Sino Biological Cat. No. 10692-H08H) in 1×PBST pH 7.4 for 120 sec to generate an association curve. In the dissociation phase, the antibody-antigen complex on the sensor was exposed to 1×PBST pH 7.4 for 300-600 sec. Baseline, association, and dissociation were repeated using 1×PBST pH 5.4 throughout in a separate condition. Association and dissociation phase curves were examined for the starting ABPC antibody (with no substitutions) and each corresponding antibody variant at pH 5.4 and pH 7.4 to inform on two criteria: a) enhanced dissociation (i.e., higher koff values) at pH 5.4 due to histidine or alanine substitution compared to the starting ABPC (with no substitutions), and b) reduced dissociation at pH 7.4 (i.e., lower koff values) compared to pH 5.4 in the antibody variant itself and with the starting ABPC (with no substitutions). Light chain variants that showed either enhanced dissociation at pH 5.4 or reduced dissociation at pH 7.4 or both (as compared to the starting ABPC), as shown in FIG. 25 were selected for further analysis (e.g, MYT3959, MYT3960, MYT3963, MYT3966, MYT3967, MYT3969, MYT3970, MYT3978, MYT3979, MYT3982, MYT3983, and MYT3984). It was also noted that some histidine and alanine mutations were tolerated with little (e.g., less than 1-fold change in dissociation constant K_{D} or dissociation rate) or no change in MET binding kinetics (e.g. MYT3958, MYT3961, MYT3962, MYT3964, MYT3965, MYT3968, MYT3971, MYT3972, MYT3973, MYT3974, MYT3975, MYT3976, MYT3977, MYT3980, MYT3981, and MYT3985). Especially because histidine is a large, positively charged amino acid, these variants with no change were noted as positions in the light chain that may tolerate a wide range of mutations and lead to antibodies with different sequence but similar binding properties, a designation that is not otherwise apparent.

### Example 18. Construction and Screening of pH-Engineered MET ABPCs

[1074] Multiple MET-binding monoclonal antibodies have been described in the literature and can be used as a template for engineering pH-dependent binding (Feng Y et al. “MET Antibody Drug Conjugate” US Patent Application US 2020/0061204 A1 (2020)). We selected Emibetuzumab (Heavy chain SEQ ID NO: 146, Light chain SEQ ID NO: 147) as a MET-binding monoclonal antibody for pH engineering via histidine scanning. Briefly, CDRs in the heavy chain were identified using the methods described by Kabat et al (Kabat et al. (1992) Sequences of Proteins of Immunological Interest, DIANE publishing) and IMGT (Lefranc M P (1999) “The IMGT unique numbering for Immunoglobulins, T cell receptors and Ig-like domains” The Immunologist 7, 132-136), and for each CDR, residues falling under either or both Kabat and IMGT CDR definitions were called as CDR residues. To generate pH-dependent sequence variants, individual amino acid mutations within the heavy chain CDRs that had been previously selected for further analysis in Example 16 were systematically combined two or more at a time (MYT2848-MYT2867). In cases where the starting CDR residue was a histidine, it was mutated to an alanine. Antibody variants with two or more histidine or alanine mutations in the heavy chain CDRs were generated by co-transfection of Expi293 cells with a) one heavy chain combinations sequence variant, and b) the corresponding starting ABPC light chain using methods known to the art. After allowing for four days of protein expression, cell culture supernatants were collected, quantified by SDS-PAGE analysis (FIG. 26), and the pH dependence of the variant was evaluated using biolayer interferometry (BLI) on an Octet RED 96e instrument. Briefly, cell culture supernatants were diluted based on qualitative expression level of the variant determined by visual examination of SDS-PAGE gels, 5 μL of cell culture supernatant was diluted into 195 μL of 1×PBST, pH 7.4 for high expressors, 25 μL of cell culture supernatant was diluted into 175 μL of 1×PBST, pH 7.4 for medium expressors and 100 μL of cell culture supernatant was diluted into 100 μL of 1×PBST, pH 7.4 for low expressors for loading onto the sensor tips. Diluted supernatants were then captured on an anti-human Fc sensor (Forte Bio). A baseline was established using 1×PBST (50 mM Potassium Phosphate Buffer+150 mM NaCl+0.05% Tween 20) pH 7.4, and the sensor was associated with 50 nM of MET (cMET, Sino Biological Cat. No. 10692-H08H)) in 1×PBST pH 7.4 for 120 sec to generate an association curve. In the dissociation phase, the antibody-antigen complex on the sensor was exposed to 1×PBST pH 7.4 for 300-600 sec. Baseline, association, and dissociation were repeated using 1×PBST pH 5.4 throughout in a separate condition. Association and dissociation phase curves were examined for the starting ABPC antibody (with no substitutions) and each corresponding antibody variant at pH 5.4 and pH 7.4 to inform on two criteria: a) enhanced dissociation (i.e., higher koff values) at pH 5.4 due to histidine or alanine substitution compared to the starting ABPC (with no substitutions), and b) reduced dissociation at pH 7.4 (i.e., lower koff values) compared to pH 5.4 in the antibody variant itself and with the starting ABPC (with no substitutions). Heavy chain combinations variants that showed either enhanced dissociation at pH 5.4 or reduced dissociation at pH 7.4 or both (as compared to the starting ABPC), as shown in FIG. 27 were selected for further analysis (e.g, MYT2848, MYT2849, MYT2850, MYT2851, MYT2852, MYT2853, MYT2854, MYT2855, MYT2856, MYT2857, MYT2858, MYT2859, MYT2861, MYT2862, MYT2863, MYT2864, MYT2865, MYT2866, and MYT2867).

### Example 19. Construction and Screening of pH-Engineered MET ABPCs

[1075] Multiple MET-binding monoclonal antibodies have been described in the literature and can be used as a template for engineering pH-dependent binding (Feng Y et al. “MET Antibody Drug Conjugate” US Patent Application US 2020/0061204 A1 (2020)). We selected Emibetuzumab (Heavy chain SEQ ID NO: 146, Light chain SEQ ID NO: 147) as a MET-binding monoclonal antibody for pH engineering via histidine scanning. Briefly, CDRs in the light chain were identified using the methods described by Kabat et al (Kabat et al. (1992) Sequences of Proteins of Immunological Interest, DIANE publishing) and IMGT (Lefranc M P (1999) “The IMGT unique numbering for Immunoglobulins, T cell receptors and Ig-like domains” The Immunologist 7, 132-136), and for each CDR, residues falling under either or both Kabat and IMGT CDR definitions were called as CDR residues. To generate pH-dependent sequence variants, individual amino acid mutations within the light chain CDRs that had been previously selected for further analysis in Example 17 were systematically combined two or more at a time (MYT4326-MYT4345). In cases where the starting CDR residue was a histidine, it was mutated to an alanine. Antibody variants with two or more histidine or alanine mutations in the light chain CDRs were generated by co-transfection of Expi293 cells with a) one light chain combinations sequence variant, and b) the corresponding starting ABPC heavy chain using methods known to the art. After allowing for four days of protein expression, cell culture supernatants were collected, quantified by SDS-PAGE analysis (FIG. 28), and the pH dependence of the variant was evaluated using biolayer interferometry (BLI) on an Octet RED 96e instrument. Briefly, cell culture supernatants were diluted based on qualitative expression level of the variant determined by visual examination of SDS-PAGE gels, 5 μL of cell culture supernatant was diluted into 195 μL of 1×PBST, pH 7.4 for high expressors, 25 μL of cell culture supernatant was diluted into 175 μL of 1×PBST, pH 7.4 for medium expressors and 100 μL of cell culture supernatant was diluted into 100 μL of 1×PBST, pH 7.4 for low expressors for loading onto the sensor tips. Diluted supernatants were then captured on an anti-human Fc sensor (Forte Bio). A baseline was established using 1×PBST (50 mM Potassium Phosphate Buffer+150 mM NaCl+0.05% Tween 20), pH 7.4, and the sensor was associated with MET (cMET, Sino Biological Cat. No. 10692-H08H) in 1×PBST, pH 7.4, for 120 sec to generate an association curve. In the dissociation phase, the antibody-antigen complex on the sensor was exposed to 1×PBST, pH 7.4, for 300-600 sec. Baseline, association, and dissociation were repeated using 1×PBST, pH 5.4, throughout in a separate condition. Association and dissociation phase curves were examined for the starting ABPC antibody (with no substitutions) and each corresponding antibody variant at pH 5.4 and pH 7.4 to inform on two criteria: a) enhanced dissociation (e.g., higher koff values) at pH 5.4 due to histidine or alanine substitution compared to the starting ABPC (with no substitutions), and b) reduced dissociation at pH 7.4 (e.g., lower koff values) compared to pH 5.4 in the antibody variant itself and with the starting ABPC (with no substitutions). Light chain combinations variants that showed either enhanced dissociation at pH 5.4 or reduced dissociation at pH 7.4 or both (as compared to the starting ABPC), as shown in FIG. 29 were selected for further analysis (e.g, MYT4326, MYT4327, MYT4328, MYT4329, MYT4330, MYT4331, MYT4332, MYT4333, MYT4334, MYT4335, MYT4336, MYT4337, MYT4338, MYT4339, MYT4340, MYT4342, MYT4343).

### Example 20. Construction and Screening of pH-Engineered MET ABPCs

[1076] Multiple MET-binding monoclonal antibodies have been described in the literature and can be used as a template for engineering pH-dependent binding (Feng Y et al. “MET Antibody Drug Conjugate” US Patent Application US 2020/0061204 A1 (2020)). We selected Emibetuzumab (Heavy chain SEQ ID NO: 146, Light chain SEQ ID NO: 147) as a MET-binding monoclonal antibody for pH engineering via histidine scanning. Briefly, CDRs in the heavy and light chains were identified using the methods described by Kabat et al (Kabat et al. (1992) Sequences of Proteins of Immunological Interest, DIANE publishing) and IMGT (Lefranc M P (1999) “The IMGT unique numbering for Immunoglobulins, T cell receptors and Ig-like domains” The Immunologist 7, 132-136), and for each CDR, residues falling under either or both Kabat and IMGT CDR definitions were called as CDR residues. To generate pH-dependent sequence variants, individual amino acid mutations within the heavy and light chain CDRs that had been previously selected for further analysis in Examples 16-19 were systematically combined two or more at a time (MYT3999-MYT4042). In cases where the starting CDR residue was a histidine, it was mutated to an alanine. Antibody variants with two or more histidine or alanine mutations were generated by co-transfection of Expi293 cells with a) one light chain sequence variant or light chain combinations sequence variant, and b) one heavy chain sequence variant or heavy chain combinations sequence variant using methods known to the art. After allowing for four days of protein expression, cell culture supernatants were collected, quantified by SDS-PAGE analysis (FIG. 30), and the pH dependence of the variant was evaluated using biolayer interferometry (BLI) on an Octet RED 96e instrument. Briefly, cell culture supernatants were diluted based on qualitative expression level of the variant determined by visual examination of SDS-PAGE gels, 5 μL of cell culture supernatant was diluted into 195 μL of 1×PBST, pH 7.4 for high expressors, 25 μL of cell culture supernatant was diluted into 175 μL of 1×PBST, pH 7.4 for medium expressors and 100 μL of cell culture supernatant was diluted into 100 μL of 1×PBST, pH 7.4 for low expressors for loading onto the sensor tips. Diluted supernatants were then captured on an anti-human Fc sensor (Forte Bio). A baseline was established using 1×PBST (50 mM Potassium Phosphate Buffer+150 mM NaCl+0.05% Tween 20), pH 7.4, and the sensor was associated with 50 nM of MET (cMET, Sino Biological Cat. No. 10692-H08H) in 1×PBST, pH 7.4, for 120 sec to generate an association curve. In the dissociation phase, the antibody-antigen complex on the sensor was exposed to 1×PBST, pH 7.4, for 300-600 sec. Baseline, association, and dissociation were repeated using 1×PBST, pH 5.4, throughout in a separate condition. Association and dissociation phase curves were examined for the starting ABPC antibody (with no substitutions) and each corresponding antibody variant at pH 5.4 and pH 7.4 to inform on two criteria: a) enhanced dissociation (e.g., higher koff values) at pH 5.4 due to histidine or alanine substitution compared to the starting ABPC (with no substitutions), and b) reduced dissociation at pH 7.4 (e.g., lower koff values) compared to pH 5.4 in the antibody variant itself and with the starting ABPC (with no substitutions). Paired heavy and light chain variants that showed either enhanced dissociation at pH 5.4 or reduced dissociation at pH 7.4 or both (as compared to the starting ABPC), as shown in FIG. 31, were selected for further analysis (e.g, MYT3999, MYT4000, MYT4001, MYT4002, MYT4003, MYT4004, MYT4005, MYT4006, MYT4007, MYT4008, MYT4009, MYT4010, MYT4011, MYT4012, MYT4013, MYT4014, MYT4015, MYT4016, MYT4017, MYT4018, MYT4019, MYT4023, MYT4027, MYT4032, MYT4033, MYT4034, MYT4035, MYT4036, MYT4037, MYT4038, MYT4039, MYT4040, MYT4041, and MYT4042).

### Example 21. Construction and Screening of pH-Engineered MET ABPCs

[1077] Multiple MET-binding monoclonal antibodies have been described in the literature and can be used as a template for engineering pH-dependent binding (Feng Y et al. “MET Antibody Drug Conjugate” US Patent Application US 2020/0061204 A1 (2020)). We selected Emibetuzumab (Heavy chain SEQ ID NO: 146, Light chain SEQ ID NO: 147) as a MET-binding monoclonal antibody for pH engineering via histidine scanning. Briefly, CDRs in the heavy chain were identified using the methods described by Kabat et al (Kabat et al. (1992) Sequences of Proteins of Immunological Interest, DIANE publishing) and IMGT (Lefranc M P (1999) “The IMGT unique numbering for Immunoglobulins, T cell receptors and Ig-like domains” The Immunologist 7, 132-136), and for each CDR, residues falling under either or both Kabat and IMGT CDR definitions were called as CDR residues. To generate pH-dependent sequence variants, individual amino acid mutations within the heavy chain CDRs that had been previously selected for further analysis in Example 16 were systematically combined two or more at a time (MYT4995-MYT5041). In cases where the starting CDR residue was a histidine, it was mutated to an alanine. Antibody variants with two or more histidine or alanine mutations in the heavy chain CDRs were generated by co-transfection of Expi293 cells with a) one heavy chain combinations sequence variant containing the triple hinge (TH) and YTE mutations described in (Wang J et al (2017) ABBV-399, a c-Met Antibody-Drug Conjugate that Targets Both MET-Amplified and c-Met-Overexpressing Tumors, Irrespective of MET Pathway Dependence, Clin Cancer Res, 23:992-1000) and (Dall, W F et al “Increasing the Affinity of a Human IgG1 for the Neonatal Fc Receptor: Biological Consequences” The Journal of Immunology (2002); 169:5171-5180) respectively, and b) the corresponding starting ABPC light chain using methods known to the art. After allowing for four days of protein expression, cell culture supernatants were collected, quantified by SDS-PAGE analysis (FIG. 32), purified using protein A magnetic beads (Genscript L00273), and evaluated for endolysosomal delivery on Detroit 562 cells (ATCC CCL-138). Detroit 562 cells (ATCC; CCL-138) were collected and resuspended in EMEM medium (ATCC; 30-2003)+10% GenClone heat inactivated fetal bovine serum (HI FBS) (Genesee Scientific; 25-514H). Cell counts were determined using trypan blue staining and the Countess II FL Automated Cell Counter (Thermofisher; AMQAF1000). Cells are then diluted to 100,000 cells/mL and 100 ul was seeded into 96-well flat bottom cell culture plates and allowed to attach overnight in 37 C 5% CO2. Primary antibodies were then diluted in native culture mediums to 20 nM and then mixed 1:1 with 60 nM Incucyte Human FabFluor-pH Red Antibody Labeling Reagent (Sartorius; 4722). The mixture was incubated for 20 minutes at room temperature, followed by addition to cells. Plates were then placed immediately into the Incucyte S3 Live-Cell Analysis System for image acquisition and analysis. Endolysosomal delivery was examined for the starting ABPC antibody (with no substitutions) and each corresponding antibody variant to inform on enhanced endolysosomal delivery due to histidine or alanine substitution compared to the starting ABPC (with no substitutions).

### Example 22. Construction and Screening of pH-Engineered MET ABPCs

[1078] Multiple MET-binding monoclonal antibodies have been described in the literature and can be used as a template for engineering pH-dependent binding (Hicks, S W and Lai, K “MET Antibodies and Immunoconjugates and uses thereof” International Patent Application WO 2020/014306 A1 (2020)). We selected hucMET27Gv1.3 (Heavy chain SEQ ID NO: 304, Light chain SEQ ID NO: 305) as a MET-binding monoclonal antibody for pH engineering via histidine scanning. Briefly, CDRs in the heavy chain were identified using the methods described by Kabat et al (Kabat et al. (1992) Sequences of Proteins of Immunological Interest, DIANE publishing) and IMGT (Lefranc M P (1999) “The IMGT unique numbering for Immunoglobulins, T cell receptors and Ig-like domains” The Immunologist 7, 132-136), and for each CDR, residues falling under either or both Kabat and IMGT CDR definitions were called as CDR residues. To generate pH-dependent sequence variants, individual amino acid residues within the heavy chain CDRs were systematically substituted with a histidine, one at a time (MYT3618-MYT3655). In cases where the starting CDR residue was a histidine, it was mutated to an alanine. Antibody variants with only one histidine or alanine mutation in a heavy chain CDR were generated by co-transfection of Expi293 cells with a) one heavy chain sequence variant, and b) the corresponding starting ABPC light chain using methods known to the art. After allowing for four days of protein expression, cell culture supernatants were collected, quantified by SDS-PAGE analysis (FIG. 39), and the pH dependence of the variant was evaluated using biolayer interferometry (BLI) on an Octet RED 96e instrument. Briefly, cell culture supernatants were diluted based on qualitative expression level of the variant determined by visual examination of SDS-PAGE gels, 5 μL of cell culture supernatant was diluted into 195 μL of 1×PBST, pH 7.4 for high expressors, 25 μL of cell culture supernatant was diluted into 175 μL of 1×PBST, pH 7.4 for medium expressors and 100 μL of cell culture supernatant was diluted into 100 μL of 1×PBST, pH 7.4 for low expressors for loading onto the sensor tips. Diluted supernatants were then captured on an anti-human Fc sensor (Forte Bio). A baseline was established using 1×PBST (50 mM Potassium Phosphate Buffer+150 mM NaCl+0.05% Tween 20) pH 7.4, and the sensor was associated with 50 nM of MET (cMET, Sino Biological Cat. No. 10692-H08H) in 1×PBST pH 7.4 for 120 sec to generate an association curve. In the dissociation phase, the antibody-antigen complex on the sensor was exposed to 1×PBST pH 7.4 for 300-600 sec. Baseline, association, and dissociation were repeated using 1×PBST pH 5.4 throughout in a separate condition. Association and dissociation phase curves were examined for the starting ABPC antibody (with no substitutions) and each corresponding antibody variant at pH 5.4 and pH 7.4 to inform on two criteria: a) enhanced dissociation (i.e., higher koff values) at pH 5.4 due to histidine or alanine substitution compared to the starting ABPC, (with no substitutions), and b) reduced dissociation at pH 7.4 (i.e., lower koff values) compared to pH 5.4 in the antibody variant itself and with the starting ABPC (with no substitutions). Heavy chain variants that showed either enhanced dissociation at pH 5.4 or reduced dissociation at pH 7.4 or both (as compared to the starting ABPC), as shown in FIG. 40 were selected for further analysis (e.g, MYT3619, MYT3626, MYT3627, MYT3628, MYT3629, MYT3630, MYT3632, MYT3633, MYT3634, MYT3635, MYT3636, MYT3637, MYT3638, MYT3639, MYT3640, MYT3641, MYT3642, MYT3643, MYT3646, MYT3647, MYT3651, and MYT3653). It was also noted that while some histidine and alanine mutations obliterated MET binding (e.g. MYT3624, MYT3645, MYT3648, MYT3649, MYT3650, MYT3652, and MYT3654), others were tolerated with little (e.g., less than 1-fold change in dissociation constant K_{D} or dissociation rate) or no change in MET binding kinetics (e.g. MYT3618, MYT3620, MYT3621, MYT3622, MYT3623, MYT3625, MYT3631, MYT3644, and MYT3655).

[1079] Especially because histidine is a large, positively charged amino acid, these variants with no change were noted as positions in the heavy chain that may tolerate a wide range of mutations and lead to antibodies with different sequence but similar binding properties, a designation that is not otherwise apparent.

### Example 23. Construction and Screening of pH-Engineered MET ABPCs

[1080] Multiple MET-binding monoclonal antibodies have been described in the literature and can be used as a template for engineering pH-dependent binding (Hicks, S W and Lai, K “MET Antibodies and Immunoconjugates and uses thereof” International Patent Application WO 2020/014306 A1 (2020)). We selected hucMET27Gv1.3 (Heavy chain SEQ ID NO: 304, Light chain SEQ ID NO: 305) as a MET-binding monoclonal antibody for pH engineering via histidine scanning. Briefly, CDRs in the light chain were identified using the methods described by Kabat et al (Kabat et al. (1992) Sequences of Proteins of Immunological Interest, DIANE publishing) and IMGT (Lefranc M P (1999) “The IMGT unique numbering for Immunoglobulins, T cell receptors and Ig-like domains” The Immunologist 7, 132-136), and for each CDR, residues falling under either or both Kabat and IMGT CDR definitions were called as CDR residues. To generate pH-dependent sequence variants, individual amino acid residues within the light chain CDRs were systematically substituted with a histidine, one at a time (MYT3656-MYT3686). In cases where the starting CDR residue was a histidine, it was mutated to an alanine. Antibody variants with only one histidine or alanine mutation in a light chain CDR were generated by co-transfection of Expi293 cells with a) one light chain sequence variant, and b) the corresponding starting ABPC heavy chain using methods known to the art. After allowing for four days of protein expression, cell culture supernatants were collected, quantified by SDS-PAGE analysis (FIG. 41), and the pH dependence of the variant was evaluated using biolayer interferometry (BLI) on an Octet RED 96e instrument. Briefly, cell culture supernatants were diluted based on qualitative expression level of the variant determined by visual examination of SDS-PAGE gels, 5 μL of cell culture supernatant was diluted into 195 μL of 1×PBST, pH 7.4 for high expressors, 25 μL of cell culture supernatant was diluted into 175 μL of 1×PBST, pH 7.4 for medium expressors and 100 μL of cell culture supernatant was diluted into 100 μL of 1×PBST, pH 7.4 for low expressors for loading onto the sensor tips. Diluted supernatants were then captured on an anti-human Fc sensor (Forte Bio). A baseline was established using 1×PBST (50 mM Potassium Phosphate Buffer+150 mM NaCl+0.05% Tween 20) pH 7.4, and the sensor was associated with 50 nM of MET (cMET, Sino Biological Cat. No. 10692-H08H) in 1×PBST pH 7.4 for 120 sec to generate an association curve. In the dissociation phase, the antibody-antigen complex on the sensor was exposed to 1×PBST pH 7.4 for 300-600 sec. Baseline, association, and dissociation were repeated using 1×PBST pH 5.4 throughout in a separate condition. Association and dissociation phase curves were examined for the starting ABPC antibody (with no substitutions) and each corresponding antibody variant at pH 5.4 and pH 7.4 to inform on two criteria: a) enhanced dissociation (i.e., higher koff values) at pH 5.4 due to histidine or alanine substitution compared to the starting ABPC (with no substitutions), and b) reduced dissociation at pH 7.4 (i.e., lower koff values) compared to pH 5.4 in the antibody variant itself and with the starting ABPC (with no substitutions). Light chain variants that showed either enhanced dissociation at pH 5.4 or reduced dissociation at pH 7.4 or both (as compared to the starting ABPC), as shown in FIG. 42 were selected for further analysis (e.g, MYT3658, MYT3662, MYT3663, MYT3666, MYT3668, MYT3670, MYT3671, MYT3673, MYT3674, MYT3677, MYT3678, MYT3680, MYT3684, and MYT3686). It was also noted that some histidine and alanine mutations were tolerated with little (e.g., less than 1-fold change in dissociation constant K_{D} or dissociation rate) or no change in MET binding kinetics (e.g., MYT3656, MYT3657, MYT3659, MYT3660, MYT3661, MYT3664, MYT3667, MYT3675, MYT3679, MYT3681, MYT3682, MYT3683, and MYT3685). Especially because histidine is a large, positively charged amino acid, these variants with no change were noted as positions in the light chain that may tolerate a wide range of mutations and lead to antibodies with different sequence but similar binding properties, a designation that is not otherwise apparent.

### Example 24. Construction and Screening of pH-Engineered MET ABPCs

[1081] Multiple MET-binding monoclonal antibodies have been described in the literature and can be used as a template for engineering pH-dependent binding (Hicks, S W and Lai, K “MET Antibodies and Immunoconjugates and uses thereof” International Patent Application WO 2020/014306 A1 (2020)). We selected hucMET27Gv1.3 (Heavy chain SEQ ID NO: 304, Light chain SEQ ID NO: 305) as a MET-binding monoclonal antibody for pH engineering via histidine scanning. Briefly, CDRs in the heavy chain were identified using the methods described by Kabat et al (Kabat et al. (1992) Sequences of Proteins of Immunological Interest, DIANE publishing) and IMGT (Lefranc M P (1999) “The IMGT unique numbering for Immunoglobulins, T cell receptors and Ig-like domains” The Immunologist 7, 132-136), and for each CDR, residues falling under either or both Kabat and IMGT CDR definitions were called as CDR residues. To generate pH-dependent sequence variants, individual amino acid mutations within the heavy chain CDRs that had been previously selected for further analysis in Example 22 were systematically combined two or more at a time (MYT4285-MYT4304). In cases where the starting CDR residue was a histidine, it was mutated to an alanine. Antibody variants with two or more histidine or alanine mutations in the heavy chain CDRs were generated by co-transfection of Expi293 cells with a) one heavy chain combinations sequence variant, and b) the corresponding starting ABPC light chain using methods known to the art. After allowing for four days of protein expression, cell culture supernatants were collected, quantified by SDS-PAGE analysis (FIG. 43), and the pH dependence of the variant was evaluated using biolayer interferometry (BLI) on an Octet RED 96e instrument. Briefly, cell culture supernatants were diluted based on qualitative expression level of the variant determined by visual examination of SDS-PAGE gels, 5 μL of cell culture supernatant was diluted into 195 μL of 1×PBST, pH 7.4 for high expressors, 25 μL of cell culture supernatant was diluted into 175 μL of 1×PBST, pH 7.4 for medium expressors and 100 μL of cell culture supernatant was diluted into 100 μL of 1×PBST, pH 7.4 for low expressors for loading onto the sensor tips. Diluted supernatants were then captured on an anti-human Fc sensor (Forte Bio). A baseline was established using 1×PBST (50 mM Potassium Phosphate Buffer+150 mM NaCl+0.05% Tween 20) pH 7.4, and the sensor was associated with 50 nM of MET (cMET, Sino Biological Cat. No. 10692-H08H)) in 1×PBST pH 7.4 for 120 sec to generate an association curve. In the dissociation phase, the antibody-antigen complex on the sensor was exposed to 1×PBST pH 7.4 for 300-600 sec. Baseline, association, and dissociation were repeated using 1×PBST pH 5.4 throughout in a separate condition. Association and dissociation phase curves were examined for the starting ABPC antibody (with no substitutions) and each corresponding antibody variant at pH 5.4 and pH 7.4 to inform on two criteria: a) enhanced dissociation (i.e., higher koff values) at pH 5.4 due to histidine or alanine substitution compared to the starting ABPC (with no substitutions), and b) reduced dissociation at pH 7.4 (i.e., lower koff values) compared to pH 5.4 in the antibody variant itself and with the starting ABPC (with no substitutions). Heavy chain combinations variants that showed either enhanced dissociation at pH 5.4 or reduced dissociation at pH 7.4 or both (as compared to the starting ABPC), as shown in FIG. 44 were selected for further analysis (e.g, MYT4285, MYT4286, MYT4287, MYT4288, MYT4289, MYT4290, MYT4291, MYT4292, MYT4293, MYT4294, MYT4296, MYT4297, MYT4299, MYT4300, MYT4301, MYT4302, MYT4303, and MYT4304.

### Example 25. Construction and Screening of pH-Engineered MET ABPCs

[1082] Multiple MET-binding monoclonal antibodies have been described in the literature and can be used as a template for engineering pH-dependent binding (Hicks, S W and Lai, K “MET Antibodies and Immunoconjugates and uses thereof” International Patent Application WO 2020/014306 A1 (2020)). We selected hucMET27Gv1.3 (Heavy chain SEQ ID NO: 304, Light chain SEQ ID NO: 305) as a MET-binding monoclonal antibody for pH engineering via histidine scanning. Briefly, CDRs in the light chain were identified using the methods described by Kabat et al (Kabat et al. (1992) Sequences of Proteins of Immunological Interest, DIANE publishing) and IMGT (Lefranc M P (1999) “The IMGT unique numbering for Immunoglobulins, T cell receptors and Ig-like domains” The Immunologist 7, 132-136), and for each CDR, residues falling under either or both Kabat and IMGT CDR definitions were called as CDR residues. To generate pH-dependent sequence variants, individual amino acid mutations within the light chain CDRs that had been previously selected for further analysis in Example 23 were systematically combined two or more at a time (MYT4222-MYT4241). In cases where the starting CDR residue was a histidine, it was mutated to an alanine. Antibody variants with two or more histidine or alanine mutations in the light chain CDRs were generated by co-transfection of Expi293 cells with a) one light chain combinations sequence variant, and b) the corresponding starting ABPC heavy chain using methods known to the art. After allowing for four days of protein expression, cell culture supernatants were collected, quantified by SDS-PAGE analysis (FIG. 45), and the pH dependence of the variant was evaluated using biolayer interferometry (BLI) on an Octet RED 96e instrument. Briefly, cell culture supernatants were diluted based on qualitative expression level of the variant determined by visual examination of SDS-PAGE gels, 5 μL of cell culture supernatant was diluted into 195 μL of 1×PBST, pH 7.4 for high expressors, 25 μL of cell culture supernatant was diluted into 175 μL of 1×PBST, pH 7.4 for medium expressors and 100 μL of cell culture supernatant was diluted into 100 μL of 1×PBST, pH 7.4 for low expressors for loading onto the sensor tips. Diluted supernatants were then captured on an anti-human Fc sensor (Forte Bio). A baseline was established using 1×PBST (50 mM Potassium Phosphate Buffer+150 mM NaCl+0.05% Tween 20), pH 7.4, and the sensor was associated with MET (cMET, Sino Biological Cat. No. 10692-H08H) in 1×PBST, pH 7.4, for 120 sec to generate an association curve. In the dissociation phase, the antibody-antigen complex on the sensor was exposed to 1×PBST, pH 7.4, for 300-600 sec. Baseline, association, and dissociation were repeated using 1×PBST, pH 5.4, throughout in a separate condition. Association and dissociation phase curves were examined for the starting ABPC antibody (with no substitutions) and each corresponding antibody variant at pH 5.4 and pH 7.4 to inform on two criteria: a) enhanced dissociation (e.g., higher koff values) at pH 5.4 due to histidine or alanine substitution compared to the starting ABPC (with no substitutions), and b) reduced dissociation at pH 7.4 (e.g., lower koff values) compared to pH 5.4 in the antibody variant itself and with the starting ABPC (with no substitutions). Light chain combinations variants that showed either enhanced dissociation at pH 5.4 or reduced dissociation at pH 7.4 or both (as compared to the starting ABPC), as shown in FIG. 46 were selected for further analysis (e.g., MYT4224, MYT4225, MYT4226, MYT4227, MYT4228, MYT4229, MYT4230, MYT4231, MYT4232, MYT4233, MYT4234, MYT4235, MYT4236, MYT4237, MYT4238, MYT4239, MYT4240, and MYT4241).

### Example 26. Construction and Screening of pH-Engineered MET ABPCs

[1083] Multiple MET-binding monoclonal antibodies have been described in the literature and can be used as a template for engineering pH-dependent binding (Hicks, S W and Lai, K “MET Antibodies and Immunoconjugates and uses thereof” International Patent Application WO 2020/014306 A1 (2020)). We selected hucMET27Gv1.3 (Heavy chain SEQ ID NO: 304, Light chain SEQ ID NO: 305) as a MET-binding monoclonal antibody for pH engineering via histidine scanning. Briefly, CDRs in the heavy chain were identified using the methods described by Kabat et al (Kabat et al. (1992) Sequences of Proteins of Immunological Interest, DIANE publishing) and IMGT (Lefranc M P (1999) “The IMGT unique numbering for Immunoglobulins, T cell receptors and Ig-like domains” The Immunologist 7, 132-136), and for each CDR, residues falling under either or both Kabat and IMGT CDR definitions were called as CDR residues. To generate pH-dependent sequence variants, individual amino acid mutations within the heavy chain CDRs that had been previously selected for further analysis in Example 22 were systematically combined two or more at a time (MYT5296 and MYT5042-MYT5065). In cases where the starting CDR residue was a histidine, it was mutated to an alanine. Antibody variants with two or more histidine or alanine mutations in the heavy chain CDRs were generated by co-transfection of Expi293 cells with a) one heavy chain combinations sequence variant containing the triple hinge (TH) and YTE mutations described in (Wang J et al (2017) ABBV-399, a c-Met Antibody-Drug Conjugate that Targets Both MET-Amplified and c-Met-Overexpressing Tumors, Irrespective of MET Pathway Dependence, Clin Cancer Res, 23:992-1000) and (Dail, W F et al “Increasing the Affinity of a Human IgG1 for the Neonatal Fc Receptor: Biological Consequences” The Journal of Immunology (2002); 169:5171-5180) respectively, and b) the corresponding starting ABPC light chain using methods known to the art. After allowing for four days of protein expression, cell culture supernatants were collected, quantified by SDS-PAGE analysis (FIG. 47), purified using protein A magnetic beads (Genscript L00273), and evaluated for endolysosomal delivery on Detroit 562 cells (ATCC CCL-138). Detroit 562 cells (ATCC; CCL-138) were collected and resuspended in EMEM medium (ATCC; 30-2003)+10% GenClone heat inactivated fetal bovine serum (HI FBS) (Genesee Scientific; 25-514H). Cell counts were determined using trypan blue staining and the Countess II FL Automated Cell Counter (Thermofisher; AMQAF1000). Cells were then diluted to 100,000 cells/mL and 100 ul was seeded into 96-well flat bottom cell culture plates and allowed to attach overnight in 37 C 5% CO2. Primary antibodies were then diluted in native culture mediums to 20 nM and then mixed 1:1 with 60 nM Incucyte Human FabFluor-pH Red Antibody Labeling Reagent (Sartorius; 4722). The mixture was incubated for 20 minutes at room temperature, followed by addition to cells. Plates were then placed immediately into the Incucyte S3 Live-Cell Analysis System for image acquisition and analysis. Endolysosomal delivery was examined for the starting ABPC antibody (with no substitutions) and each corresponding antibody variant to inform on enhanced endolysosomal delivery due to histidine or alanine substitution compared to the starting ABPC (with no substitutions).

### Example 27. Construction and Screening of pH-Engineered MET ABPCs

[1084] Multiple MET-binding monoclonal antibodies have been described in the literature and can be used as a template for engineering pH-dependent binding (Hicks, S W and Lai, K “MET Antibodies and Immunoconjugates and uses thereof” International Patent Application WO 2020/014306 A1 (2020)). We selected hucMET27Gv1.3 (Heavy chain SEQ ID NO: 304, Light chain SEQ ID NO: 305) as a MET-binding monoclonal antibody for pH engineering via histidine scanning. Briefly, CDRs in the light chain were identified using the methods described by Kabat et al (Kabat et al. (1992) Sequences of Proteins of Immunological Interest, DIANE publishing) and IMGT (Lefranc M P (1999) “The IMGT unique numbering for Immunoglobulins, T cell receptors and Ig-like domains” The Immunologist 7, 132-136), and for each CDR, residues falling under either or both Kabat and IMGT CDR definitions were called as CDR residues. To generate pH-dependent sequence variants, individual amino acid mutations within the light chain CDRs that had been previously selected for further analysis in Example 23 were systematically combined two or more at a time (MYT5066-MYT5121). In cases where the starting CDR residue was a histidine, it was mutated to an alanine. Antibody variants with two or more histidine or alanine mutations in the light chain CDRs were generated by co-transfection of Expi293 cells with a) one light chain combinations sequence variant, and b) the corresponding starting ABPC heavy chain containing the triple hinge (TH) and YTE mutations described in (Wang J et al (2017) ABBV-399, a c-Met Antibody-Drug Conjugate that Targets Both MET-Amplified and c-Met-Overexpressing Tumors, Irrespective of MET Pathway Dependence, Clin Cancer Res, 23:992-1000) and (Dall, W F et al “Increasing the Affinity of a Human IgG1 for the Neonatal Fc Receptor: Biological Consequences” The Journal of Immunology (2002); 169:5171-5180) respectively using methods known to the art. After allowing for four days of protein expression, cell culture supernatants were collected, quantified by SDS-PAGE analysis (FIG. 48), purified using protein A magnetic beads (Genscript L00273), and evaluated for endolysosomal delivery on Detroit 562 cells (ATCC CCL-138). Detroit 562 cells (ATCC; CCL-138) were collected and resuspended in EMEM medium (ATCC; 30-2003)+10% GenClone heat inactivated fetal bovine serum (HI FBS) (Genesee Scientific; 25-514H). Cell counts were determined using trypan blue staining and the Countess II FL Automated Cell Counter (Thermofisher; AMQAF1000). Cells were then diluted to 100,000 cells/mL and 100 ul was seeded into 96-well flat bottom cell culture plates and allowed to attach overnight in 37 C 5% CO2. Primary antibodies were then diluted in native culture mediums to 20 nM and then mixed 1:1 with 60 nM Incucyte Human FabFluor-pH Red Antibody Labeling Reagent (Sartorius; 4722). The mixture was incubated for 20 minutes at room temperature, followed by addition to cells. Plates were then placed immediately into the Incucyte S3 Live-Cell Analysis System for image acquisition and analysis. Endolysosomal delivery was examined for the starting ABPC antibody (with no substitutions) and each corresponding antibody variant to inform on enhanced endolysosomal delivery due to histidine or alanine substitution compared to the starting ABPC (with no substitutions). Light chain combinations variants that showed enhanced endolysosomal delivery (as compared to the starting ABPC), as shown in FIG. 49 were selected for further analysis (e.g, MYT5066, MYT5070, MYT5071, MYT5073, MYT5077, MYT5082, MYT5083, MYT5085, MYT5090, MYT5092, MYT5093, MYT5094, MYT5096, MYT5099, MYT5102, MYT5103, MYT5105, MYT5110, MYT5112, MYT5114, MYT5116, and MYT5119). The pH dependence of the selected variants were evaluated using biolayer interferometry (BLI) on an Octet RED 96e instrument. Briefly, cell culture supernatants were diluted based on qualitative expression level of the variant determined by visual examination of SDS-PAGE gels, 5 μL of cell culture supernatant was diluted into 195 μL of 1×PBST, pH 7.4 for high expressors, 25 μL of cell culture supernatant was diluted into 175 μL of 1×PBST, pH 7.4 for medium expressors and 100 μL of cell culture supernatant was diluted into 100 μL of 1×PBST, pH 7.4 for low expressors for loading onto the sensor tips. Diluted supernatants were then captured on an anti-human Fc sensor (Forte Bio). A baseline was established using 1×PBST (50 mM Potassium Phosphate Buffer+150 mM NaCl+0.05% Tween 20), pH 7.4, and the sensor was associated with MET (cMET, Sino Biological Cat. No. 10692-H08H) in 1×PBST, pH 7.4, for 120 sec to generate an association curve. In the dissociation phase, the antibody-antigen complex on the sensor was exposed to 1×PBST, pH 7.4 or pH 5.4, for 300-600 sec. Association and dissociation phase curves at pH 7.4 and pH 5.4 were examined for the starting ABPC antibody (with no substitutions) and each corresponding antibody variant to inform on two criteria: a) enhanced dissociation (e.g., higher koff values) at pH 5.4 due to histidine or alanine substitution compared to the starting ABPC (with no substitutions), and b) reduced dissociation at pH 7.4 (e.g., lower koff values) compared to pH 5.4 in the antibody variant itself and with the starting ABPC (with no substitutions). Light chain combinations variants that showed either enhanced dissociation at pH 5.4 or reduced dissociation at pH 7.4 or both (as compared to the starting ABPC), as shown in FIG. 50 were selected for further analysis (e.g, MYT5066, MYT5070, MYT5071, MYT5073, MYT5077, MYT5082, MYT5083, MYT5085, MYT5090, MYT5092, MYT5093, MYT5094, MYT5096, MYT5099, MYT5102, MYT5103, MYT5110, MYT5112, and MYT5119).

### Example 28. Construction and Screening of pH-Engineered MET ABPCs

[1085] Multiple MET-binding monoclonal antibodies have been described in the literature and can be used as a template for engineering pH-dependent binding (Fujita, R et al (2020) A Novel Non-Agonist c-Met Antibody Drug Conjugate with Superior Potency Over a c-Met Tyrosine Kinase Inhibitor in c-Met Amplified and Non-Amplified Cancers, Cancer Biology and Therapy, 21(6):549-559). We selected P3D12 (Heavy chain SEQ ID NO: 502, Light chain SEQ ID NO: 503) as a MET-binding monoclonal antibody for pH engineering via histidine scanning. Briefly, CDRs in the heavy chain were identified using the methods described by Kabat et al (Kabat et al. (1992) Sequences of Proteins of Immunological Interest, DIANE publishing) and IMGT (Lefranc M P (1999) “The IMGT unique numbering for Immunoglobulins, T cell receptors and Ig-like domains” The Immunologist 7, 132-136), and for each CDR, residues falling under either or both Kabat and IMGT CDR definitions were called as CDR residues. To generate pH-dependent sequence variants, individual amino acid residues within the heavy chain CDRs were systematically substituted with a histidine, one at a time (MYT3688-MYT3726). In cases where the starting CDR residue was a histidine, it was mutated to an alanine. Antibody variants with only one histidine or alanine mutation in a heavy chain CDR were generated by co-transfection of Expi293 cells with a) one heavy chain sequence variant, and b) the corresponding starting ABPC light chain using methods known to the art. After allowing for four days of protein expression, cell culture supernatants were collected, quantified by SDS-PAGE analysis (FIG. 57), and the pH dependence of the variant was evaluated using biolayer interferometry (BLI) on an Octet RED 96e instrument. Briefly, cell culture supernatants were diluted based on qualitative expression level of the variant determined by visual examination of SDS-PAGE gels, 5 μL of cell culture supernatant was diluted into 195 μL of 1×PBST, pH 7.4 for high expressors, 25 μL of cell culture supernatant was diluted into 175 μL of 1×PBST, pH 7.4 for medium expressors and 100 μL of cell culture supernatant was diluted into 100 μL of 1×PBST, pH 7.4 for low expressors for loading onto the sensor tips. This diluted supernatant was then captured on an anti-human Fc sensor (Forte Bio). A baseline was established using 1×PBST (50 mM Potassium Phosphate Buffer+150 mM NaCl+0.05% Tween 20) pH 7.4, and the sensor was associated with 50 nM of MET (cMET, Sino Biological Cat. No. 10692-H08H) in 1×PBST pH 7.4 for 120 sec to generate an association curve. In the dissociation phase, the antibody-antigen complex on the sensor was exposed to 1×PBST pH 7.4 for 300-600 sec. Baseline, association, and dissociation were repeated using 1×PBST pH 5.4 throughout in a separate condition. Association and dissociation phase curves were examined for the starting ABPC antibody (with no substitutions) and each corresponding antibody variant at pH 5.4 and pH 7.4 to inform on two criteria: a) enhanced dissociation (i.e., higher koff values) at pH 5.4 due to histidine or alanine substitution compared to the starting ABPC, (with no substitutions), and b) reduced dissociation at pH 7.4 (i.e., lower koff values) compared to pH 5.4 in the antibody variant itself and with the starting ABPC (with no substitutions). Heavy chain variants that showed either enhanced dissociation at pH 5.4 or reduced dissociation at pH 7.4 or both (as compared to the starting ABPC), as shown in FIG. 58 were selected for further analysis (e.g, MYT3689, MYT3691, MYT3692, MYT3694, MYT3695, MYT3696, MYT3697, MYT3698, MYT3699, MYT3700, MYT3701, MYT3705, MYT3707, MYT3716, MYT3718, MYT3719, MYT3720, MYT3721, MYT3724, and MYT3725). It was also noted that some histidine and alanine mutations were tolerated with little (e.g., less than 1-fold change in dissociation constant KD or dissociation rate) or no change in MET binding kinetics (e.g., MYT3688, MYT3690, MYT3693, MYT3702, MYT3703, MYT3704, MYT3706, MYT3708, MYT3709, MYT3710, MYT3711, MYT3712, MYT3713, MYT3714, MYT3717, and MYT3726).

[1086] Especially because histidine is a large, positively charged amino acid, these variants with no change were noted as positions in the heavy chain that may tolerate a wide range of mutations and lead to antibodies with different sequence but similar binding properties, a designation that is not otherwise apparent.

### Example 29. Construction and Screening of pH-Engineered MET ABPCs

[1087] Multiple MET-binding monoclonal antibodies have been described in the literature and can be used as a template for engineering pH-dependent binding (Fujita, R et al (2020) A Novel Non-Agonist c-Met Antibody Drug Conjugate with Superior Potency Over a c-Met Tyrosine Kinase Inhibitor in c-Met Amplified and Non-Amplified Cancers, Cancer Biology and Therapy, 21(6):549-559). We selected P3D12 (Heavy chain SEQ ID NO: 502, Light chain SEQ ID NO: 503) as a MET-binding monoclonal antibody for pH engineering via histidine scanning. Briefly, CDRs in the light chain were identified using the methods described by Kabat et al (Kabat et al. (1992) Sequences of Proteins of Immunological Interest, DIANE publishing) and IMGT (Lefranc M P (1999) “The IMGT unique numbering for Immunoglobulins, T cell receptors and Ig-like domains” The Immunologist 7, 132-136), and for each CDR, residues falling under either or both Kabat and IMGT CDR definitions were called as CDR residues. To generate pH-dependent sequence variants, individual amino acid residues within the light chain CDRs were systematically substituted with a histidine, one at a time (MYT3727-MYT3754). In cases where the starting CDR residue was a histidine, it was mutated to an alanine. Antibody variants with only one histidine or alanine mutation in a light chain CDR were generated by co-transfection of Expi293 cells with a) one light chain sequence variant, and b) the corresponding starting ABPC heavy chain using methods known to the art. After allowing for four days of protein expression, cell culture supernatants were collected, quantified by SDS-PAGE analysis (FIG. 59), and the pH dependence of the variant was evaluated using biolayer interferometry (BLI) on an Octet RED 96e instrument. Briefly, cell culture supernatants were diluted based on qualitative expression level of the variant determined by visual examination of SDS-PAGE gels, 5 μL of cell culture supernatant was diluted into 195 μL of 1×PBST, pH 7.4 for high expressors, 25 μL of cell culture supernatant was diluted into 175 μL of 1×PBST, pH 7.4 for medium expressors and 100 μL of cell culture supernatant was diluted into 100 μL of 1×PBST, pH 7.4 for low expressors for loading onto the sensor tips. Diluted supernatants were then captured on an anti-human Fc sensor (Forte Bio). A baseline was established using 1×PBST (50 mM Potassium Phosphate Buffer+150 mM NaCl+0.05% Tween 20) pH 7.4, and the sensor was associated with 50 nM of MET (cMET, Sino Biological Cat. No. 10692-H08H) in 1×PBST pH 7.4 for 120 sec to generate an association curve. In the dissociation phase, the antibody-antigen complex on the sensor was exposed to 1×PBST pH 7.4 for 300-600 sec. Baseline, association, and dissociation were repeated using 1×PBST pH 5.4 throughout in a separate condition. Association and dissociation phase curves were examined for the starting ABPC antibody (with no substitutions) and each corresponding antibody variant at pH 5.4 and pH 7.4 to inform on two criteria: a) enhanced dissociation (i.e., higher koff values) at pH 5.4 due to histidine or alanine substitution compared to the starting ABPC (with no substitutions), and b) reduced dissociation at pH 7.4 (i.e., lower koff values) compared to pH 5.4 in the antibody variant itself and with the starting ABPC (with no substitutions). Light chain variants that showed either enhanced dissociation at pH 5.4 or reduced dissociation at pH 7.4 or both (as compared to the starting ABPC), as shown in FIG. 60 were selected for further analysis (e.g, MYT3728, MYT3732, MYT3734, MYT3735, MYT3736, MYT3737, MYT3738, MYT3740, MYT3743, MYT3747, MYT3748, MYT3749, MYT3750, MYT3751, MYT3752, MYT3753, and MYT3754). It was also noted that some histidine and alanine mutations were tolerated with little (e.g., less than 1-fold change in dissociation constant K_{D} or dissociation rate) or no change in MET binding kinetics (e.g., MYT3727, MYT3729, MYT3730, MYT3731, MYT3733, MYT3739, MYT3741, MYT3742, MYT3744, MYT3745, and MYT3746). Especially because histidine is a large, positively charged amino acid, these variants with no change were noted as positions in the light chain that may tolerate a wide range of mutations and lead to antibodies with different sequence but similar binding properties, a designation that is not otherwise apparent.

### Example 30. Construction and Screening of pH-Engineered MET ABPCs

[1088] Multiple MET-binding monoclonal antibodies have been described in the literature and can be used as a template for engineering pH-dependent binding (Fujita, R et al (2020) A Novel Non-Agonist c-Met Antibody Drug Conjugate with Superior Potency Over a c-Met Tyrosine Kinase Inhibitor in c-Met Amplified and Non-Amplified Cancers, Cancer Biology and Therapy, 21(6):549-559). We selected P3D12 (Heavy chain SEQ ID NO: 502, Light chain SEQ ID NO: 503) as a MET-binding monoclonal antibody for pH engineering via histidine scanning. Briefly, CDRs in the heavy chain were identified using the methods described by Kabat et al (Kabat et al. (1992) Sequences of Proteins of Immunological Interest, DIANE publishing) and IMGT (Lefranc M P (1999) “The IMGT unique numbering for Immunoglobulins, T cell receptors and Ig-like domains” The Immunologist 7, 132-136), and for each CDR, residues falling under either or both Kabat and IMGT CDR definitions were called as CDR residues. To generate pH-dependent sequence variants, individual amino acid mutations within the heavy chain CDRs that had been previously selected for further analysis in Example 28 were systematically combined two or more at a time (MYT4306-MYT4325). In cases where the starting CDR residue was a histidine, it was mutated to an alanine. Antibody variants with two or more histidine or alanine mutations in the heavy chain CDRs were generated by co-transfection of Expi293 cells with a) one heavy chain combinations sequence variant, and b) the corresponding starting ABPC light chain using methods known to the art. After allowing for four days of protein expression, cell culture supernatants were collected, quantified by SDS-PAGE analysis (FIG. 61), and the pH dependence of the variant was evaluated using biolayer interferometry (BLI) on an Octet RED 96e instrument. Briefly, cell culture supernatants were diluted based on qualitative expression level of the variant determined by visual examination of SDS-PAGE gels, 5 μL of cell culture supernatant was diluted into 195 μL of 1×PBST, pH 7.4 for high expressors, 25 μL of cell culture supernatant was diluted into 175 μL of 1×PBST, pH 7.4 for medium expressors and 100 μL of cell culture supernatant was diluted into 100 μL of 1×PBST, pH 7.4 for low expressors for loading onto the sensor tips. Diluted supernatants were then captured on an anti-human Fc sensor (Forte Bio). A baseline was established using 1×PBST (50 mM Potassium Phosphate Buffer+150 mM NaCl+0.05% Tween 20) pH 7.4, and the sensor was associated with 50 nM of MET (cMET, Sino Biological Cat. No. 10692-H08H)) in 1×PBST pH 7.4 for 120 sec to generate an association curve. In the dissociation phase, the antibody-antigen complex on the sensor was exposed to 1×PBST pH 7.4 for 300-600 sec. Baseline, association, and dissociation were repeated using 1×PBST pH 5.4 throughout in a separate condition. Association and dissociation phase curves were examined for the starting ABPC antibody (with no substitutions) and each corresponding antibody variant at pH 5.4 and pH 7.4 to inform on two criteria: a) enhanced dissociation (i.e., higher koff values) at pH 5.4 due to histidine or alanine substitution compared to the starting ABPC (with no substitutions), and b) reduced dissociation at pH 7.4 (i.e., lower koff values) compared to pH 5.4 in the antibody variant itself and with the starting ABPC (with no substitutions). Heavy chain combinations variants that showed either enhanced dissociation at pH 5.4 or reduced dissociation at pH 7.4 or both (as compared to the starting ABPC), as shown in FIG. 62 were selected for further analysis (e.g, MYT4307, MYT4308, MYT4309, MYT4310, MYT4311, MYT4312, MYT4313, MYT4314, MYT4315, MYT4316, MYT4317, MYT4318, MYT4319, MYT4320, MYT4321, MYT4322, MYT4323, MYT4324, and MYT4325).

### Example 31. Construction and Screening of pH-Engineered MET ABPCs

[1089] Multiple MET-binding monoclonal antibodies have been described in the literature and can be used as a template for engineering pH-dependent binding (Fujita, R et al (2020) A Novel Non-Agonist c-Met Antibody Drug Conjugate with Superior Potency Over a c-Met Tyrosine Kinase Inhibitor in c-Met Amplified and Non-Amplified Cancers, Cancer Biology and Therapy, 21(6):549-559). We selected P3D12 (Heavy chain SEQ ID NO: 502, Light chain SEQ ID NO: 503) as a MET-binding monoclonal antibody for pH engineering via histidine scanning. Briefly, CDRs in the light chain were identified using the methods described by Kabat et al (Kabat et al. (1992) Sequences of Proteins of Immunological Interest, DIANE publishing) and IMGT (Lefranc M P (1999) “The IMGT unique numbering for Immunoglobulins, T cell receptors and Ig-like domains” The Immunologist 7, 132-136), and for each CDR, residues falling under either or both Kabat and IMGT CDR definitions were called as CDR residues. To generate pH-dependent sequence variants, individual amino acid mutations within the light chain CDRs that had been previously selected for further analysis in Example 29 were systematically combined two or more at a time (MYT4242-MYT4261). In cases where the starting CDR residue was a histidine, it was mutated to an alanine. Antibody variants with two or more histidine or alanine mutations in the light chain CDRs were generated by co-transfection of Expi293 cells with a) one light chain combinations sequence variant, and b) the corresponding starting ABPC heavy chain using methods known to the art. After allowing for four days of protein expression, cell culture supernatants were collected, quantified by SDS-PAGE analysis (FIG. 63), and the pH dependence of the variant was evaluated using biolayer interferometry (BLI) on an Octet RED 96e instrument. Briefly, cell culture supernatants were diluted based on qualitative expression level of the variant determined by visual examination of SDS-PAGE gels, 5 μL of cell culture supernatant was diluted into 195 μL of 1×PBST, pH 7.4 for high expressors, 25 μL of cell culture supernatant was diluted into 175 μL of 1×PBST, pH 7.4 for medium expressors and 100 μL of cell culture supernatant was diluted into 100 μL of 1×PBST, pH 7.4 for low expressors for loading onto the sensor tips. Diluted supernatants were then captured on an anti-human Fc sensor (Forte Bio). A baseline was established using 1×PBST (50 mM Potassium Phosphate Buffer+150 mM NaCl+0.05% Tween 20), pH 7.4, and the sensor was associated with MET (cMET, Sino Biological Cat. No. 10692-H08H) in 1×PBST, pH 7.4, for 120 sec to generate an association curve. In the dissociation phase, the antibody-antigen complex on the sensor was exposed to 1×PBST, pH 7.4, for 300-600 sec. Baseline, association, and dissociation were repeated using 1×PBST, pH 5.4, throughout in a separate condition. Association and dissociation phase curves were examined for the starting ABPC antibody (with no substitutions) and each corresponding antibody variant at pH 5.4 and pH 7.4 to inform on two criteria: a) enhanced dissociation (e.g., higher koff values) at pH 5.4 due to histidine or alanine substitution compared to the starting ABPC (with no substitutions), and b) reduced dissociation at pH 7.4 (e.g., lower koff values) compared to pH 5.4 in the antibody variant itself and with the starting ABPC (with no substitutions). Light chain combinations variants that showed either enhanced dissociation at pH 5.4 or reduced dissociation at pH 7.4 or both (as compared to the starting ABPC), as shown in FIG. 64 were selected for further analysis (e.g., MYT4242, MYT4243, MYT4244, MYT4245, MYT4246, MYT4247, MYT4248, MYT4249, MYT4250, MYT4251, MYT4252, MYT4253, MYT4254, MYT4255, MYT4256, MYT4257, and MYT4258).

### Example 32. Construction and Screening of pH-Engineered MET ABPCs

[1090] Multiple MET-binding monoclonal antibodies have been described in the literature and can be used as a template for engineering pH-dependent binding (Fujita, R et al (2020) A Novel Non-Agonist c-Met Antibody Drug Conjugate with Superior Potency Over a c-Met Tyrosine Kinase Inhibitor in c-Met Amplified and Non-Amplified Cancers, Cancer Biology and Therapy, 21(6):549-559). We selected P3D12 (Heavy chain SEQ ID NO: 502, Light chain SEQ ID NO: 503) as a MET-binding monoclonal antibody for pH engineering via histidine scanning. Briefly, CDRs in the heavy and light chains were identified using the methods described by Kabat et al (Kabat et al. (1992) Sequences of Proteins of Immunological Interest, DIANE publishing) and IMGT (Lefranc M P (1999) “The IMGT unique numbering for Immunoglobulins, T cell receptors and Ig-like domains” The Immunologist 7, 132-136), and for each CDR, residues falling under either or both Kabat and IMGT CDR definitions were called as CDR residues. To generate pH-dependent sequence variants, individual amino acid mutations within the heavy and light chain CDRs that had been previously selected for further analysis in Examples 28-31 were systematically combined two or more at a time (MYT5342-MYT5381). In cases where the starting CDR residue was a histidine, it was mutated to an alanine. Antibody variants with two or more histidine or alanine mutations were generated by co-transfection of Expi293 cells with a) one light chain sequence variant or light chain combinations sequence variant, and b) one heavy chain sequence variant or heavy chain combinations sequence variant using methods known to the art. After allowing for four days of protein expression, cell culture supernatants were collected, quantified by SDS-PAGE analysis (FIG. 82), and the pH dependence of the variant was evaluated using biolayer interferometry (BLI) on an Octet RED 96e instrument. Briefly, cell culture supernatants were diluted based on qualitative expression level of the variant determined by visual examination of SDS-PAGE gels, 5 μL of cell culture supernatant was diluted into 195 μL of 1×PBST, pH 7.4 for high expressors, 25 μL of cell culture supernatant was diluted into 175 μL of 1×PBST, pH 7.4 for medium expressors and 100 μL of cell culture supernatant was diluted into 100 μL of 1×PBST, pH 7.4 for low expressors for loading onto the sensor tips. Diluted supernatants were then captured on an anti-human Fc sensor (Forte Bio). A baseline was established using 1×PBST (50 mM Potassium Phosphate Buffer+150 mM NaCl+0.05% Tween 20), pH 7.4, and the sensor was associated with 50 nM of MET (cMET, Sino Biological Cat. No. 10692-H08H) in 1×PBST, pH 7.4, for 120 sec to generate an association curve. In the dissociation phase, the antibody-antigen complex on the sensor was exposed to 1×PBST, pH 7.4 or pH 5.4, for 300-600 sec. Association and dissociation phase curves were examined for the starting ABPC antibody (with no substitutions) and each corresponding antibody variant at pH 5.4 and pH 7.4 to inform on two criteria: a) enhanced dissociation (e.g., higher koff values) at pH 5.4 due to histidine or alanine substitution compared to the starting ABPC (with no substitutions), and b) reduced dissociation at pH 7.4 (e.g., lower koff values) compared to pH 5.4 in the antibody variant itself and with the starting ABPC (with no substitutions). Paired heavy and light chain variants that showed either enhanced dissociation at pH 5.4 or reduced dissociation at pH 7.4 or both (as compared to the starting ABPC), as shown in FIG. 83, were selected for further analysis (e.g., MYT5342, MYT5343, MYT5344, MYT5345, MYT5346, MYT5350, MYT5351, MYT5352, MYT5353, MYT5354, MYT5355, MYT5356, MYT5357, MYT5359, MYT5360, MYT5366, MYT5367, MYT5368, MYT5369, MYT5370, MYT5372, MYT5373, MYT5374, MYT5375, MYT5376, MYT5377, and MYT5381).

### Example 33. Construction and Screening of pH-Engineered MET ABPCs

[1091] Multiple MET-binding monoclonal antibodies have been described in the literature and can be used as a template for engineering pH-dependent binding (Fujita, R et al (2020) A Novel Non-Agonist c-Met Antibody Drug Conjugate with Superior Potency Over a c-Met Tyrosine Kinase Inhibitor in c-Met Amplified and Non-Amplified Cancers, Cancer Biology and Therapy, 21(6):549-559). We selected P3D12 (Heavy chain SEQ ID NO: 502, Light chain SEQ ID NO: 503) as a MET-binding monoclonal antibody for pH engineering via histidine scanning. Briefly, CDRs in the heavy chain were identified using the methods described by Kabat et al (Kabat et al. (1992) Sequences of Proteins of Immunological Interest, DIANE publishing) and IMGT (Lefranc M P (1999) “The IMGT unique numbering for Immunoglobulins, T cell receptors and Ig-like domains” The Immunologist 7, 132-136), and for each CDR, residues falling under either or both Kabat and IMGT CDR definitions were called as CDR residues. To generate pH-dependent sequence variants, individual amino acid mutations within the heavy chain CDRs that had been previously selected for further analysis in Example 28 were systematically combined two or more at a time (MYT5122-MYT5221). In cases where the starting CDR residue was a histidine, it was mutated to an alanine. Antibody variants with two or more histidine or alanine mutations in the heavy chain CDRs were generated by co-transfection of Expi293 cells with a) one heavy chain combinations sequence variant containing the triple hinge (TH) and YTE mutations described in (Wang J et al (2017) ABBV-399, a c-Met Antibody-Drug Conjugate that Targets Both MET-Amplified and c-Met-Overexpressing Tumors, Irrespective of MET Pathway Dependence, Clin Cancer Res, 23:992-1000) and (Dail, W F et al “Increasing the Affinity of a Human IgG1 for the Neonatal Fc Receptor: Biological Consequences” The Journal of Immunology (2002); 169:5171-5180) respectively, and b) the corresponding starting ABPC light chain using methods known to the art. After allowing for four days of protein expression, cell culture supernatants were collected, quantified by SDS-PAGE analysis (FIG. 65), purified using protein A magnetic beads (Genscript L00273), and evaluated for endolysosomal delivery on Detroit 562 cells (ATCC CCL-138). Briefly, Detroit 562 cells (ATCC; CCL-138) were collected and resuspended in EMEM medium (ATCC; 30-2003)+10% GenClone heat inactivated fetal bovine serum (HI FBS) (Genesee Scientific; 25-514H). Cell counts were determined using trypan blue staining and the Countess II FL Automated Cell Counter (Thermofisher; AMQAF1000). Cells were then diluted to 100,000 cells/mL and 100 ul was seeded into 96-well flat bottom cell culture plates and allowed to attach overnight in 37 C 5% CO2. Primary antibodies were then diluted in native culture mediums to 20 nM and then mixed 1:1 with 60 nM Incucyte Human FabFluor-pH Red Antibody Labeling Reagent (Sartorius; 4722). The mixture was incubated for 20 minutes at room temperature, followed by addition to cells. Plates were then placed immediately into the Incucyte S3 Live-Cell Analysis System for image acquisition and analysis. Endolysosomal delivery was examined for the starting ABPC antibody (with no substitutions) and each corresponding antibody variant to inform on enhanced endolysosomal delivery due to histidine or alanine substitution compared to the starting ABPC (with no substitutions). Heavy chain combinations variants that showed enhanced endolysosomal delivery (as compared to the starting ABPC), as shown in FIG. 66 were selected for further analysis (e.g, MYT5122, MYT5131, MYT5146, MYT5184, and MYT5201). The pH dependence of the selected variants were evaluated using biolayer interferometry (BLI) on an Octet RED 96e instrument. Briefly, cell culture supernatants were diluted based on qualitative expression level of the variant determined by visual examination of SDS-PAGE gels, 5 μL of cell culture supernatant was diluted into 195 μL of 1×PBST, pH 7.4 for high expressors, 25 μL of cell culture supernatant was diluted into 175 μL of 1×PBST, pH 7.4 for medium expressors and 100 μL of cell culture supernatant was diluted into 100 μL of 1×PBST, pH 7.4 for low expressors for loading onto the sensor tips. Diluted supernatants were then captured on an anti-human Fc sensor (Forte Bio). A baseline was established using 1×PBST (50 mM Potassium Phosphate Buffer+150 mM NaCl+0.05% Tween 20), pH 7.4, and the sensor was associated with MET (cMET, Sino Biological Cat. No. 10692-H08H) in 1×PBST, pH 7.4, for 120 sec to generate an association curve. In the dissociation phase, the antibody-antigen complex on the sensor was exposed to 1×PBST, pH 7.4 or pH 5.4, for 300-600 sec. Association and dissociation phase curves at pH 7.4 and pH 5.4 were examined for the starting ABPC antibody (with no substitutions) and each corresponding antibody variant to inform on two criteria: a) enhanced dissociation (e.g., higher koff values) at pH 5.4 due to histidine or alanine substitution compared to the starting ABPC (with no substitutions), and b) reduced dissociation at pH 7.4 (e.g., lower koff values) compared to pH 5.4 in the antibody variant itself and with the starting ABPC (with no substitutions). Heavy chain combinations variants that showed either enhanced dissociation at pH 5.4 or reduced dissociation at pH 7.4 or both (as compared to the starting ABPC), as shown in FIG. 67 were selected for further analysis (e.g, MYT5122, MYT5131, MYT5146, MYT5184, and MYT5201).

### Example 34. Construction and Screening of pH-Engineered MET ABPCs

[1092] Multiple MET-binding monoclonal antibodies have been described in the literature and can be used as a template for engineering pH-dependent binding (Fujita, R et al (2020) A Novel Non-Agonist c-Met Antibody Drug Conjugate with Superior Potency Over a c-Met Tyrosine Kinase Inhibitor in c-Met Amplified and Non-Amplified Cancers, Cancer Biology and Therapy, 21(6):549-559). We selected P3D12 (Heavy chain SEQ ID NO: 502, Light chain SEQ ID NO: 503) as a MET-binding monoclonal antibody for pH engineering via histidine scanning. Briefly, CDRs in the light chain were identified using the methods described by Kabat et al (Kabat et al. (1992) Sequences of Proteins of Immunological Interest, DIANE publishing) and IMGT (Lefranc M P (1999) “The IMGT unique numbering for Immunoglobulins, T cell receptors and Ig-like domains” The Immunologist 7, 132-136), and for each CDR, residues falling under either or both Kabat and IMGT CDR definitions were called as CDR residues. To generate pH-dependent sequence variants, individual amino acid mutations within the light chain CDRs that had been previously selected for further analysis in Example 29 were systematically combined two or more at a time (MYT5222-MYT5295). In cases where the starting CDR residue was a histidine, it was mutated to an alanine. Antibody variants with two or more histidine or alanine mutations in the light chain CDRs were generated by co-transfection of Expi293 cells with a) one light chain combinations sequence variant, and b) the corresponding starting ABPC heavy chain containing the triple hinge (TH) and YTE mutations described in (Wang J et al (2017) ABBV-399, a c-Met Antibody-Drug Conjugate that Targets Both MET-Amplified and c-Met-Overexpressing Tumors, Irrespective of MET Pathway Dependence, Clin Cancer Res, 23:992-1000) and (Dall, W F et al “Increasing the Affinity of a Human IgG1 for the Neonatal Fc Receptor: Biological Consequences” The Journal of Immunology (2002); 169:5171-5180) respectively using methods known to the art. After allowing for four days of protein expression, cell culture supernatants were collected, quantified by SDS-PAGE analysis (FIG. 68), purified using protein A magnetic beads (Genscript L00273), and evaluated for endolysosomal delivery on Detroit 562 cells (ATCC CCL-138). Briefly, Detroit 562 cells (ATCC; CCL-138) were collected and resuspended in EMEM medium (ATCC; 30-2003)+10% GenClone heat inactivated fetal bovine serum (HI FBS) (Genesee Scientific; 25-514H). Cell counts were determined using trypan blue staining and the Countess II FL Automated Cell Counter (Thermofisher; AMQAF1000). Cells were then diluted to 100,000 cells/mL and 100 ul was seeded into 96-well flat bottom cell culture plates and allowed to attach overnight in 37 C 5% CO2. Primary antibodies were then diluted in native culture mediums to 20 nM and then mixed 1:1 with 60 nM Incucyte Human FabFluor-pH Red Antibody Labeling Reagent (Sartorius; 4722). The mixture was incubated for 20 minutes at room temperature, followed by addition to cells. Plates were then placed immediately into the Incucyte S3 Live-Cell Analysis System for image acquisition and analysis. Endolysosomal delivery was examined for the starting ABPC antibody (with no substitutions) and each corresponding antibody variant to inform on enhanced endolysosomal delivery due to histidine or alanine substitution compared to the starting ABPC (with no substitutions). Light chain combinations variants that showed enhanced endolysosomal delivery (as compared to the starting ABPC), as shown in FIG. 69 were selected for further analysis (e.g, MYT5237). The pH dependence of the selected variants were evaluated using biolayer interferometry (BLI) on an Octet RED 96e instrument. Briefly, cell culture supernatants were diluted based on qualitative expression level of the variant determined by visual examination of SDS-PAGE gels, 5 μL of cell culture supernatant was diluted into 195 μL of 1×PBST, pH 7.4 for high expressors, 25 μL of cell culture supernatant was diluted into 175 μL of 1×PBST, pH 7.4 for medium expressors and 100 μL of cell culture supernatant was diluted into 100 μL of 1×PBST, pH 7.4 for low expressors for loading onto the sensor tips. Diluted supernatants were then captured on an anti-human Fc sensor (Forte Bio). A baseline was established using 1×PBST (50 mM Potassium Phosphate Buffer+150 mM NaCl+0.05% Tween 20), pH 7.4, and the sensor was associated with MET (cMET, Sino Biological Cat. No. 10692-H08H) in 1×PBST, pH 7.4, for 120 sec to generate an association curve. In the dissociation phase, the antibody-antigen complex on the sensor was exposed to 1×PBST, pH 7.4 or pH 5.4, for 300-600 sec. Association and dissociation phase curves at pH 7.4 and pH 5.4 were examined for the starting ABPC antibody (with no substitutions) and each corresponding antibody variant to inform on two criteria: a) enhanced dissociation (e.g., higher koff values) at pH 5.4 due to histidine or alanine substitution compared to the starting ABPC (with no substitutions), and b) reduced dissociation at pH 7.4 (e.g., lower koff values) compared to pH 5.4 in the antibody variant itself and with the starting ABPC (with no substitutions). Light chain combinations variants that showed either enhanced dissociation at pH 5.4 or reduced dissociation at pH 7.4 or both (as compared to the starting ABPC), as shown in FIG. 70 were selected for further analysis (e.g, MYT5237).

### Example 35. Reformatting of Anti-MET ABPCs

[1093] Select pH engineered anti-MET variants were generated as both wild-type IgG1 molecules (e.g., in Examples 9-13, 16-20, 22-25, and 28-32) and as IgG1 molecules containing the triple hinge (TH) mutations, as described by (Wang J et al (2017) ABBV-399, a c-Met Antibody-Drug Conjugate that Targets Both MET-Amplified and c-Met-Overexpressing Tumors, Irrespective of MET Pathway Dependence, Clin Cancer Res, 23:992-1000), and the YTE mutations, as described by (Dall, W F et al “Increasing the Affinity of a Human IgG1 for the Neonatal Fc Receptor: Biological Consequences” The Journal of Immunology (2002); 169:5171-5180), by transfection of Expi293 cells with a plasmid encoding for the variable heavy region fused genetically to human IgG1 Fc with or without the TH and YTE mutations (FIG. 80). Co-transfection of Expi293 cells with a) one heavy chain sequence consisting of a variable heavy chain region and constant regions corresponding to either wild-type human IgG1 isotype or the same sequence except with TH and YTE mutations, and b) one light chain sequence, using methods known to the art. After allowing for four days of protein expression, cell culture supernatants were collected, quantified by SDS-PAGE analysis (select examples shown in FIG. 77), and the pH dependence of the variant was evaluated using biolayer interferometry (BLI) on an Octet RED 96e instrument. Briefly, cell culture supernatants were diluted based on qualitative expression level of the variant determined by visual examination of SDS-PAGE gels, 5 μL of cell culture supernatant was diluted into 195 μL of 1×PBST, pH 7.4 for high expressors, 25 μL of cell culture supernatant was diluted into 175 μL of 1×PBST, pH 7.4 for medium expressors and 100 μL of cell culture supernatant was diluted into 100 μL of 1×PBST, pH 7.4 for low expressors for loading onto the sensor tips. Diluted supernatants were then captured on an anti-human Fc sensor (Forte Bio). A baseline was established using 1×PBST (50 mM Potassium Phosphate Buffer+150 mM NaCl+0.05% Tween 20), pH 7.4, and the sensor was associated with 50 nM of MET (cMET, Sino Biological Cat. No. 10692-H08H) in 1×PBST, pH 7.4, for 120 sec to generate an association curve. In the dissociation phase, the antibody-antigen complex on the sensor was exposed to 1×PBST, pH 7.4, for 300-600 sec. Baseline, association, and dissociation were repeated using 1×PBST, pH 5.4, throughout in a separate condition. Association and dissociation phase curves were examined for each corresponding antibody variant at pH 5.4 and pH 7.4 to inform on three criteria: a) enhanced dissociation (e.g., higher koff values) at pH 5.4 as compared to its corresponding starting ABPC, b) reduced dissociation at pH 7.4 (e.g., lower koff values) compared to pH 5.4 in the antibody variant itself, and c) comparison of the wild-type human IgG1 ABPCs and their TH and YTE containing variants. Wild-type human IgG1 and reformatted human IgG1 antibodies containing the TH and YTE mutations showed broadly similar association and dissociation curves, and selected Octet plots and endolysosomal delivery data are shown in FIGS. 78 and 79, respectively. We conclude from this data that the desirable properties of our variant variable domain sequences, including but not limited to pH dependence and endolysosomal delivery, are retained whether in IgG1 format or in IgG1 format with the TH and YTE mutations.

### Example 36. Characterization of Cellular Internalization and Endolysosomal Delivery of pH Engineered Anti-MET ABPCs

[1094] Selected anti-MET pH engineered antibody variants from Examples 9-13, 16-20, 22-25, and 28-31 were analyzed for internalization and endolysosomal delivery in U-87 MG cells (MET+), SNU-5 cells (MET+), NCI-H1373 cells (MET+), NCI-H1573 cells (MET+) and/or Detroit 562 cells (MET+). U-87 MG cells (ATCC HTB-14), Detroit 562 cells (ATCC CCL-138), NCI-H1373 cells (ATCC CRL-5866), NCI-H1573 cells (ATCC CRL-5877) or SNU-5 cells (ATCC CRL-5973) were collected and resuspended in EMEM medium (U-87 MG and Detroit 562, ATCC; 30-2003), IMDM medium (SNU-5, ATCC; 30-2005), or RPMI medium (NCI-H1373 and NCI-H1573, ATCC 30-2001) plus 5% (NCI-H1573), 10% (U-87 MG, Detroit 562, NCI-H1373) or 20% (SNU-5) GenClone heat inactivated fetal bovine serum (HI FBS) (Genesee Scientific; 25-514H). Cell counts were determined using trypan blue staining and the Countess II FL Automated Cell Counter (Thermofisher; AMQAF1000). Cells were then diluted to 2,000,000 cells/mL and 50 μl/well was seeded into 96-well flat bottom cell culture plates (Genesee Scientific; 25-109). Anti-MET pH engineered antibody variants, starting ABPC antibodies, control IgG1 isotype control (BP0297, Bioxcell), and vehicle control were diluted in native culture media, and then mixed 1:1 with a 3× molar ratio Zenon pHrodo iFL Human IgG Labeling Reagent (ThermoFisher; Z25611). The mixture was incubated for 20 minutes at room temperature, followed by a 1:1 addition of cells for a final volume of 100 μL. The mixture of cells, anti-MET antibody variants, and Zenon pHrodo iFL Human IgG Labeling Reagent was incubated at 37° C., 5% CO2 for 1-24 hours. Following incubation, 100 μL of ice cold Flow Cytometry (FC) buffer (phosphate buffered saline (PBS), pH 7.4+2 mM ethylenediaminetetraacetic acid (EDTA)+2% (v/v) HI FBS is added to each well. Cells were then spun down at 4° C. for 2 min at 2000 rpm, washed with 200 μL ice cold FC buffer and resuspended in 100 μL ice cold FC buffer. Mean green fluorescence intensity was detected using a BD Accuri C6 flow cytometer. Data was analyzed using Flowjo analysis software. pHrodo green is a pH sensitive dye that fluoresces in the low pH environment of the endosomes and lysosomes and therefore can be used to quantify antibody internalization and endolysosomal delivery. Internalization and endolysosomal delivery of anti-MET starting ABPC's and variants at concentrations specified in the figures, in U-87 MG (MET+), Detroit 562 (MET+), SNU-5 (MET+), NCI-H1573 (MET+), or NCI-H1373 (MET+) cells, as specified in the figures, is shown in FIG. 81, as measured by pHrodo green mean fluorescence intensity. Several pH engineered anti-MET antibody variants showed increased mean fluorescence intensity relative to their corresponding starting ABPC antibodies demonstrating that increased dissociation at lower pH leads to enhanced internalization and endolysosomal delivery inside cells as shown by increased fluorescence or increased fluorescence as compared to IgG1 isotype control. Increased endolysosomal delivery is quantitated for each pH engineered anti-MET antibody variant on the top of each bar as a ratio of: the variant's mean fluorescence intensity minus the mean fluorescence intensity of the IgG control, then all divided by the variant's corresponding starting ABPC's mean fluorescence intensity minus the mean fluorescence intensity of the IgG control. For example MYT0888, MYT0916, MYT0920, MYT0924, MYT2018, MYT2019, MYT2020, MYT2022, MYT2023, MYT2025, MYT2026, MYT2033, MYT2038, MYT2040, MYT2043, MYT2049, MYT2864, MYT3451, MYT3452, MYT3453, MYT3454, MYT3457, MYT3465, MYT3466, MYT3467, MYT3468, MYT3469, MYT3471, MYT3474, MYT3482, MYT3485, MYT3609, MYT3611, MYT3615, MYT4201, MYT4202, MYT4204, MYT4205, and MYT4207, antibody variants of telisotuzumab, show increased internalization and endolysosomal delivery relative to telisotuzumab (MYT0886). For example MYT2319, MYT2320, MYT2325, MYT2326, MYT2327, MYT2328, MYT2333, MYT2343, MYT2344, MYT2850, MYT2851, MYT2852, MYT2853, MYT2855, MYT2856, MYT2861, MYT2864, MYT2865, MYT4326, MYT4327, MYT4332, MYT4334, and MYT4336, antibody variants of emibetuzumab, show increased internalization and endolysosomal delivery relative to emibetuzumab (MYT2313). For example MYT3619, MYT3638, MYT3639, MYT3651, MYT3653, MYT3661, MYT3662, MYT3664, MYT3666, MYT3668, MYT3671, MYT3677, MYT3679, MYT3684, MYT4223, MYT4225, MYT4226, MYT4228, MYT4231, MYT4232, MYT4236, MYT4239, MYT4291, MYT4302, MYT4303, and MYT4304, antibody variants of hucMET27Gv1.3, show increased internalization and endolysosomal delivery relative to hucMET27Gv1.3 (MYT3617). For example MYT3689, MYT3691, MYT3694, MYT3695, MYT3697, MYT3698, MYT3705, MYT3707, MYT3720, MYT3724, MYT3725, MYT3728, MYT3732, MYT3735, MYT3738, MYT3740, MYT3748, MYT3749, MYT3750, MYT3751, MYT3752, MYT3753, MYT3754, MYT4242, MYT4243, MYT4245, MYT4247, MYT4249, MYT4250, MYT4252, MYT4258, MYT4309, MYT4310, MYT4311, MYT4318, MYT4319, MYT4320, MYT4322, MYT4323, MYT4324, and MYT4325, antibody variants of P3D12, show increased internalization and endolysosomal delivery relative to P3D12 (MYT3687 and/or MYT4305). Such pH engineered anti-MET antibody variants with increased mean fluorescence intensity relative to their starting ABPC antibodies were selected for further analysis.

### Example 37. Thermal Stability of Anti-MET mAbs

[1095] Protein melting temperature (Tm) was measured through the use of Differential Scanning Flourimetry (DSF). DSF visualizes protein unfolding by measuring the fluorescent signal from the molecule Sypro Orange (Thermo Scientific cat. no. 56650) as a protein unfolds due to heating. As a protein unfolds it exposes more hydrophilic regions to the Sypro Orange dye, which in turns binds to these hydrophilic regions resulting in increase in signal. The Tm for a protein is calculated as the half-maximal of the unfolding transition and can be visualized by plotting the first derivative of the Sypro Orange signal and finding a local maximum of this derivative plot. 20 μL of protein samples in 1×PBS, pH 7.4, was mixed with 5 μL of 25× Sypro Orange master mix, yielding a final concentration of 5× Sypro Orange. The samples were added to 96-well PCR plates (Thermo Scientific Cat. No. AB-2400/W) and sealed with optical covers (Thermo Scientific Cat. No. 4360954). The PCR plate was inserted into a real-time PCR machine (Thermo Scientific Quant Studio 3) and the plate temperature was stabilized for 3 minutes at 25° C. before ramping to 95° C. by 0.2° C. increments, stabilizing for 1 second before the Sypro Orange signal was measured. The melting temperature (Tm) values for anti-MET starting ABPCs and variants are shown in FIG. 85. Several variants show similar melting temperature values to their starting ABPCs confirming that variants created through pH engineering can retain functionally appropriate thermal stabilities as compared to their corresponding starting ABPCs (e.g., emibetuzumab, hucMET27Gv1.3 or P3D12). All variants tested (see FIG. 85) had melting temperatures greater than or equal to the melting temperature of their corresponding starting ABPC (e.g., mirvetuximab) minus 10° C. and so were selected for further analysis.

[1096] The discoveries herein are in contrast to similar engineering on other antigens such as CLEC12a and two other targets wherein multiple variants per target showed enhanced dissociation at low pH, however, despite the favorable pH-dependent binding properties of these variants (which specifically bound CLEC12a and the two other targets), they had less than 10% increase in cell internalization and endolysosomal delivery as compared to the corresponding starting ABPC (e.g., the starting antibody). These variants (which specifically bound CLEC12a and the two other targets) also had similar biophysical characteristics (e.g., antibody expression, thermal stability, affinity at pH 7.4 etc.) to the corresponding starting ABPC (e.g., the starting antibody) confirming that this was not specific to the biophysical properties of the tested variant (i.e. the biophysical properties unrelated to enhanced dissociation at pH 5.4).

### Other Embodiments

[1097] It is to be understood that while the invention has been described in conjunction with the detailed description thereof, the foregoing description is intended to illustrate and not limit the scope of the invention, which is defined by the scope of the appended claims. Other aspects, advantages, and modifications are within the scope of the following claims.

### SEQUENCE APPENDIX

Sequence Appendix

>Heavy Chain of Telisotuzumab IgG (SEQ ID NO: 1)
QVQLVQSGAEVKKPGASVKVSCKASGYIFTAYTMHWVRQAPGQGLEWMGWIKPN
NGLANYAQKFQGRVTMTRDTSISTAYMELSRLRSDDTAVYYCARSEITTEFDYWGQ
GTLVTVSS
>Light Chain of Telisotuzumab IgG (SEQ ID NO: 2)
DIVMTQSPDSLAVSLGERATINCKSSESVDSYANSFLHWYQQKPGQPPKLLIYRASTR
ESGVPDRFSGSGSGTDFTLTISSLQAEDVAVYYCQQSKEDPLTFGGGTKVEIK
>Heavy Chain CDR1 of Telisotuzumab (SEQ ID NO: 3)
GYIFTAYTMH
>Heavy Chain CDR2 of Telisotuzumab (SEQ ID NO: 4)
WIKPNNGLANYAQKFQG
>Heavy Chain CDR3 of Telisotuzumab (SEQ ID NO: 5)
ARSEITTEFDY
>Light Chain CDR1 of Telisotuzumab (SEQ ID NO: 6)
KSSESVDSYANSFLH
>Light Chain CDR2 of Telisotuzumab (SEQ ID NO: 7)
RASTRES
>Light Chain CDR3 of Telisotuzumab (SEQ ID NO: 8)
QQSKEDPLT
>Mature Human MET (SEQ ID NO: 9)
ECKEALAKSEMNVNMKYQLPNFTAETPIQNVILHEHHIFLGATNYIYVLNEEDLQKV
AEYKTGPVLEHPDCFPCQDCSSKANLSGGVWKDNINMALVVDTYYDDQLISCGSVN
RGTCQRHVFPHNHTADIQSEVHCIFSPQIEEPSQCPDCVVSALGAKVLSSVKDRFINFF
VGNTINSSYFPDHPLHSISVRRLKETKDGFMFLTDQSYIDVLPEFRDSYPIKYVHAFES
NNFIYFLTVQRETLDAQTFHTRIIRFCSINSGLHSYMEMPLECILTEKRKKRSTKKEVF
NILQAAYVSKPGAQLARQIGASLNDDILFGVFAQSKPDSAEPMDRSAMCAFPIKYVN
DFFNKIVNKNNVRCLQHFYGPNHEHCFNRTLLRNSSGCEARRDEYRTEFTTALQRVD
LFMGQFSEVLLTSISTFIKGDLTIANLGTSEGRFMQVVVSRSGPSTPHVNFLLDSHPVS
PEVIVEHTLNQNGYTLVITGKKITKIPLNGLGCRHFQSCSQCLSAPPFVQCGWCHDKC
VRSEECLSGTWTQQICLPAIYKVFPNSAPLEGGTRLTICGWDFGFRRNNKFDLKKTR
VLLGNESCTLTLSESTMNTLKCTVGPAMNKHFNMSIIISNGHGTTQYSTFSYVDPVIT
SISPKYGPMAGGTLLTLTGNYLNSGNSRHISIGGKTCTLKSVSNSILECYTPAQTISTEF
AVKLKIDLANRETSIFSYREDPIVYEIHPTKSFISGGSTITGVGKNLNSVSVPRMVINVH
EAGRNFTVACQHRSNSEIICCTTPSLQQLNLQLPLKTKAFFMLDGILSKYFDLIYVHNP
VFKPFEKPVMISMGNENVLEIKGNDIDPEAVKGEVLKVGNKSCENIHLHSEAVLCTV
PNDLLKLNSELNIEWKQAISSTVLGKVIVQPDQNFTGLIAGVVSISTALLLLLGFFLWL
KKRKQIKDLGSELVRYDARVHTPHLDRLVSARSVSPTTEMVSNESVDYRATFPEDQF
PNSSQNGSCRQVQYPLTDMSPILTSGDSDISSPLLQNTVHIDLSALNPELVQAVQHVVI
GPSSLIVHFNEVIGRGHFGCVYHGTLLDNDGKKIHCAVKSLNRITDIGEVSQFLTEGII
MKDFSHPNVLSLLGICLRSEGSPLVVLPYMKHGDLRNFIRNETHNPTVKDLIGFGLQV
AKGMKYLASKKFVHRDLAARNCMLDEKFTVKVADFGLARDMYDKEYYSVHNKTG
AKLPVKWMALESLQTQKFTTKSDVWSFGVLLWELMTRGAPPYPDVNTFDITVYLLQ
GRRLLQPEYCPDPLYEVMLKCWHPKAEMRPSFSELVSRISAIFSTFIGEHYVHVNATY
VNVKCVAPYPSLLSSEDNADDEVDTRPASFWETS
>cDNA Encoding Mature Human MET (SEQ ID NO: 10)
GAGTGTAAAGAGGCACTAGCAAAGTCCGAGATGAATGTGAATATGAAGTATCAG
CTTCCCAACTTCACCGCGGAAACACCCATCCAGAATGTCATTCTACATGAGCATC
ACATTTTCCTTGGTGCCACTAACTACATTTATGTTTTAAATGAGGAAGACCTTCAG
AAGGTTGCTGAGTACAAGACTGGGCCTGTGCTGGAACACCCAGATTGTTTCCCAT
GTCAGGACTGCAGCAGCAAAGCCAATTTATCAGGAGGTGTTTGGAAAGATAACA
TCAACATGGCTCTAGTTGTCGACACCTACTATGATGATCAACTCATTAGCTGTGG
CAGCGTCAACAGAGGGACCTGCCAGCGACATGTCTTTCCCCACAATCATACTGCT
GACATACAGTCGGAGGTTCACTGCATATTCTCCCCACAGATAGAAGAGCCCAGC
CAGTGTCCTGACTGTGTGGTGAGCGCCCTGGGAGCCAAAGTCCTTTCATCTGTAA
AGGACCGGTTCATCAACTTCTTTGTAGGCAATACCATAAATTCTTCTTATTTCCCA
GATCATCCATTGCATTCGATATCAGTGAGAAGGCTAAAGGAAACGAAAGATGGT
TTTATGTTTTTGACGGACCAGTCCTACATTGATGTTTTACCTGAGTTCAGAGATTC
TTACCCCATTAAGTATGTCCATGCCTTTGAAAGCAACAATTTTATTTACTTCTTGA
CGGTCCAAAGGGAAACTCTAGATGCTCAGACTTTTCACACAAGAATAATCAGGT
TCTGTTCCATAAACTCTGGATTGCATTCCTACATGGAAATGCCTCTGGAGTGTATT
CTCACAGAAAAGAGAAAAAAGAGATCCACAAAGAAGGAAGTGTTTAATATACTT
CAGGCTGCGTATGTCAGCAAGCCTGGGGCCCAGCTTGCTAGACAAATAGGAGCC
AGCCTGAATGATGACATTCTTTTCGGGGTGTTCGCACAAAGCAAGCCAGATTCTG
CCGAACCAATGGATCGATCTGCCATGTGTGCATTCCCTATCAAATATGTCAACGA
CTTCTTCAACAAGATCGTCAACAAAAACAATGTGAGATGTCTCCAGCATTTTTAC
GGACCCAATCATGAGCACTGCTTTAATAGGACACTTCTGAGAAATTCATCAGGCT
GTGAAGCGCGCCGTGATGAATATCGAACAGAGTTTACCACAGCTTTGCAGCGCG
TTGACTTATTCATGGGTCAATTCAGCGAAGTCCTCTTAACATCTATATCCACCTTC
ATTAAAGGAGACCTCACCATAGCTAATCTTGGGACATCAGAGGGTCGCTTCATGC
AGGTTGTGGTTTCTCGATCAGGACCATCAACCCCTCATGTGAATTTTCTCCTGGA
CTCCCATCCAGTGTCTCCAGAAGTGATTGTGGAGCATACATTAAACCAAAATGGC
TACACACTGGTTATCACTGGGAAGAAGATCACGAAGATCCCATTGAATGGCTTG
GGCTGCAGACATTTCCAGTCCTGCAGTCAATGCCTCTCTGCCCCACCCTTTGTTCA
GTGTGGCTGGTGCCACGACAAATGTGTGCGATCGGAGGAATGCCTGAGCGGGAC
ATGGACTCAACAGATCTGTCTGCCTGCAATCTACAAGGTTTTCCCAAATAGTGCA
CCCCTTGAAGGAGGGACAAGGCTGACCATATGTGGCTGGGACTTTGGATTTCGG
AGGAATAATAAATTTGATTTAAAGAAAACTAGAGTTCTCCTTGGAAATGAGAGC
TGCACCTTGACTTTAAGTGAGAGCACGATGAATACATTGAAATGCACAGTTGGTC
CTGCCATGAATAAGCATTTCAATATGTCCATAATTATTTCAAATGGCCACGGGAC
AACACAATACAGTACATTCTCCTATGTGGATCCTGTAATAACAAGTATTTCGCCG
AAATACGGTCCTATGGCTGGTGGCACTTTACTTACTTTAACTGGAAATTACCTAA
ACAGTGGGAATTCTAGACACATTTCAATTGGTGGAAAAACATGTACTTTAAAAA
GTGTGTCAAACAGTATTCTTGAATGTTATACCCCAGCCCAAACCATTTCAACTGA
GTTTGCTGTTAAATTGAAAATTGACTTAGCCAACCGAGAGACAAGCATCTTCAGT
TACCGTGAAGATCCCATTGTCTATGAAATTCATCCAACCAAATCTTTTATTAGTG
GTGGGAGCACAATAACAGGTGTTGGGAAAAACCTGAATTCAGTTAGTGTCCCGA
GAATGGTCATAAATGTGCATGAAGCAGGAAGGAACTTTACAGTGGCATGTCAAC
ATCGCTCTAATTCAGAGATAATCTGTTGTACCACTCCTTCCCTGCAACAGCTGAA
TCTGCAACTCCCCCTGAAAACCAAAGCCTTTTTCATGTTAGATGGGATCCTTTCC
AAATACTTTGATCTCATTTATGTACATAATCCTGTGTTTAAGCCTTTTGAAAAGCC
AGTGATGATCTCAATGGGCAATGAAAATGTACTGGAAATTAAGGGAAATGATAT
TGACCCTGAAGCAGTTAAAGGTGAAGTGTTAAAAGTTGGAAATAAGAGCTGTGA
GAATATACACTTACATTCTGAAGCCGTTTTATGCACGGTCCCCAATGACCTGCTG
AAATTGAACAGCGAGCTAAATATAGAGTGGAAGCAAGCAATTTCTTCAACCGTC
CTTGGAAAAGTAATAGTTCAACCAGATCAGAATTTCACAGGATTGATTGCTGGTG
TTGTCTCAATATCAACAGCACTGTTATTACTACTTGGGTTTTTCCTGTGGCTGAAA
AAGAGAAAGCAAATTAAAGATCTGGGCAGTGAATTAGTTCGCTACGATGCAAGA
GTACACACTCCTCATTTGGATAGGCTTGTAAGTGCCCGAAGTGTAAGCCCAACTA
CAGAAATGGTTTCAAATGAATCTGTAGACTACCGAGCTACTTTTCCAGAAGATCA
GTTTCCTAATTCATCTCAGAACGGTTCATGCCGACAAGTGCAGTATCCTCTGACA
GACATGTCCCCCATCCTAACTAGTGGGGACTCTGATATATCCAGTCCATTACTGC
AAAATACTGTCCACATTGACCTCAGTGCTCTAAATCCAGAGCTGGTCCAGGCAGT
GCAGCATGTAGTGATTGGGCCCAGTAGCCTGATTGTGCATTTCAATGAAGTCATA
GGAAGAGGGCATTTTGGTTGTGTATATCATGGGACTTTGTTGGACAATGATGGCA
AGAAAATTCACTGTGCTGTGAAATCCTTGAACAGAATCACTGACATAGGAGAAG
TTTCCCAATTTCTGACCGAGGGAATCATCATGAAAGATTTTAGTCATCCCAATGT
CCTCTCGCTCCTGGGAATCTGCCTGCGAAGTGAAGGGTCTCCGCTGGTGGTCCTA
CCATACATGAAACATGGAGATCTTCGAAATTTCATTCGAAATGAGACTCATAATC
CAACTGTAAAAGATCTTATTGGCTTTGGTCTTCAAGTAGCCAAAGGCATGAAATA
TCTTGCAAGCAAAAAGTTTGTCCACAGAGACTTGGCTGCAAGAAACTGTATGCTG
GATGAAAAATTCACAGTCAAGGTTGCTGATTTTGGTCTTGCCAGAGACATGTATG
ATAAAGAATACTATAGTGTACACAACAAAACAGGTGCAAAGCTGCCAGTGAAGT
GGATGGCTTTGGAAAGTCTGCAAACTCAAAAGTTTACCACCAAGTCAGATGTGT
GGTCCTTTGGCGTGCTCCTCTGGGAGCTGATGACAAGAGGAGCCCCACCTTATCC
TGACGTAAACACCTTTGATATAACTGTTTACTTGTTGCAAGGGAGAAGACTCCTA
CAACCCGAATACTGCCCAGACCCCTTATATGAAGTAATGCTAAAATGCTGGCACC
CTAAAGCCGAAATGCGCCCATCCTTTTCTGAACTGGTGTCCCGGATATCAGCGAT
CTTCTCTACTTTCATTGGGGAGCACTATGTCCATGTGAACGCTACTTATGTGAAC
GTAAAATGTGTCGCTCCGTATCCTTCTCTGTTGTCATCAGAAGATAACGCTGATG
ATGAGGTGGACACACGACCAGCCTCCTTCTGGGAGACATCA
>Extracellular Domain of MET (SEQ ID NO: 11)
ECKEALAKSEMNVNMKYQLPNFTAETPIQNVILHEHHIFLGATNYIYVLNEEDLQKV
AEYKTGPVLEHPDCFPCQDCSSKANLSGGVWKDNINMALVVDTYYDDQLISCGSVN
RGTCQRHVFPHNHTADIQSEVHCIFSPQIEEPSQCPDCVVSALGAKVLSSVKDRFINFF
VGNTINSSYFPDHPLHSISVRRLKETKDGFMFLTDQSYIDVLPEFRDSYPIKYVHAFES
NNFIYFLTVQRETLDAQTFHTRIIRFCSINSGLHSYMEMPLECILTEKRKKRSTKKEVF
NILQAAYVSKPGAQLARQIGASLNDDILFGVFAQSKPDSAEPMDRSAMCAFPIKYVN
DFFNKIVNKNNVRCLQHFYGPNHEHCFNRTLLRNSSGCEARRDEYRTEFTTALQRVD
LFMGQFSEVLLTSISTFIKGDLTIANLGTSEGRFMQVVVSRSGPSTPHVNFLLDSHPVS
PEVIVEHTLNQNGYTLVITGKKITKIPLNGLGCRHFQSCSQCLSAPPFVQCGWCHDKC
VRSEECLSGTWTQQICLPAIYKVFPNSAPLEGGTRLTICGWDFGFRRNNKFDLKKTR
VLLGNESCTLTLSESTMNTLKCTVGPAMNKHFNMSIIISNGHGTTQYSTFSYVDPVIT
SISPKYGPMAGGTLLTLTGNYLNSGNSRHISIGGKTCTLKSVSNSILECYTPAQTISTEF
AVKLKIDLANRETSIFSYREDPIVYEIHPTKSFISGGSTITGVGKNLNSVSVPRMVINVH
EAGRNFTVACQHRSNSEIICCTTPSLQQLNLQLPLKTKAFFMLDGILSKYFDLIYVHNP
VFKPFEKPVMISMGNENVLEIKGNDIDPEAVKGEVLKVGNKSCENIHLHSEAVLCTV
PNDLLKLNSELNIEWKQAISSTVLGKVIVQPDQNFT
>cDNA Encoding Extracellular Domain of MET (SEQ ID NO: 12)
GAGTGTAAAGAGGCACTAGCAAAGTCCGAGATGAATGTGAATATGAAGTATCAG
CTTCCCAACTTCACCGCGGAAACACCCATCCAGAATGTCATTCTACATGAGCATC
ACATTTTCCTTGGTGCCACTAACTACATTTATGTTTTAAATGAGGAAGACCTTCAG
AAGGTTGCTGAGTACAAGACTGGGCCTGTGCTGGAACACCCAGATTGTTTCCCAT
GTCAGGACTGCAGCAGCAAAGCCAATTTATCAGGAGGTGTTTGGAAAGATAACA
TCAACATGGCTCTAGTTGTCGACACCTACTATGATGATCAACTCATTAGCTGTGG
CAGCGTCAACAGAGGGACCTGCCAGCGACATGTCTTTCCCCACAATCATACTGCT
GACATACAGTCGGAGGTTCACTGCATATTCTCCCCACAGATAGAAGAGCCCAGC
CAGTGTCCTGACTGTGTGGTGAGCGCCCTGGGAGCCAAAGTCCTTTCATCTGTAA
AGGACCGGTTCATCAACTTCTTTGTAGGCAATACCATAAATTCTTCTTATTTCCCA
GATCATCCATTGCATTCGATATCAGTGAGAAGGCTAAAGGAAACGAAAGATGGT
TTTATGTTTTTGACGGACCAGTCCTACATTGATGTTTTACCTGAGTTCAGAGATTC
TTACCCCATTAAGTATGTCCATGCCTTTGAAAGCAACAATTTTATTTACTTCTTGA
CGGTCCAAAGGGAAACTCTAGATGCTCAGACTTTTCACACAAGAATAATCAGGT
TCTGTTCCATAAACTCTGGATTGCATTCCTACATGGAAATGCCTCTGGAGTGTATT
CTCACAGAAAAGAGAAAAAAGAGATCCACAAAGAAGGAAGTGTTTAATATACTT
CAGGCTGCGTATGTCAGCAAGCCTGGGGCCCAGCTTGCTAGACAAATAGGAGCC
AGCCTGAATGATGACATTCTTTTCGGGGTGTTCGCACAAAGCAAGCCAGATTCTG
CCGAACCAATGGATCGATCTGCCATGTGTGCATTCCCTATCAAATATGTCAACGA
CTTCTTCAACAAGATCGTCAACAAAAACAATGTGAGATGTCTCCAGCATTTTTAC
GGACCCAATCATGAGCACTGCTTTAATAGGACACTTCTGAGAAATTCATCAGGCT
GTGAAGCGCGCCGTGATGAATATCGAACAGAGTTTACCACAGCTTTGCAGCGCG
TTGACTTATTCATGGGTCAATTCAGCGAAGTCCTCTTAACATCTATATCCACCTTC
ATTAAAGGAGACCTCACCATAGCTAATCTTGGGACATCAGAGGGTCGCTTCATGC
AGGTTGTGGTTTCTCGATCAGGACCATCAACCCCTCATGTGAATTTTCTCCTGGA
CTCCCATCCAGTGTCTCCAGAAGTGATTGTGGAGCATACATTAAACCAAAATGGC
TACACACTGGTTATCACTGGGAAGAAGATCACGAAGATCCCATTGAATGGCTTG
GGCTGCAGACATTTCCAGTCCTGCAGTCAATGCCTCTCTGCCCCACCCTTTGTTCA
GTGTGGCTGGTGCCACGACAAATGTGTGCGATCGGAGGAATGCCTGAGCGGGAC
ATGGACTCAACAGATCTGTCTGCCTGCAATCTACAAGGTTTTCCCAAATAGTGCA
CCCCTTGAAGGAGGGACAAGGCTGACCATATGTGGCTGGGACTTTGGATTTCGG
AGGAATAATAAATTTGATTTAAAGAAAACTAGAGTTCTCCTTGGAAATGAGAGC
TGCACCTTGACTTTAAGTGAGAGCACGATGAATACATTGAAATGCACAGTTGGTC
CTGCCATGAATAAGCATTTCAATATGTCCATAATTATTTCAAATGGCCACGGGAC
AACACAATACAGTACATTCTCCTATGTGGATCCTGTAATAACAAGTATTTCGCCG
AAATACGGTCCTATGGCTGGTGGCACTTTACTTACTTTAACTGGAAATTACCTAA
ACAGTGGGAATTCTAGACACATTTCAATTGGTGGAAAAACATGTACTTTAAAAA
GTGTGTCAAACAGTATTCTTGAATGTTATACCCCAGCCCAAACCATTTCAACTGA
GTTTGCTGTTAAATTGAAAATTGACTTAGCCAACCGAGAGACAAGCATCTTCAGT
TACCGTGAAGATCCCATTGTCTATGAAATTCATCCAACCAAATCTTTTATTAGTG
GTGGGAGCACAATAACAGGTGTTGGGAAAAACCTGAATTCAGTTAGTGTCCCGA
GAATGGTCATAAATGTGCATGAAGCAGGAAGGAACTTTACAGTGGCATGTCAAC
ATCGCTCTAATTCAGAGATAATCTGTTGTACCACTCCTTCCCTGCAACAGCTGAA
TCTGCAACTCCCCCTGAAAACCAAAGCCTTTTTCATGTTAGATGGGATCCTTTCC
AAATACTTTGATCTCATTTATGTACATAATCCTGTGTTTAAGCCTTTTGAAAAGCC
AGTGATGATCTCAATGGGCAATGAAAATGTACTGGAAATTAAGGGAAATGATAT
TGACCCTGAAGCAGTTAAAGGTGAAGTGTTAAAAGTTGGAAATAAGAGCTGTGA
GAATATACACTTACATTCTGAAGCCGTTTTATGCACGGTCCCCAATGACCTGCTG
AAATTGAACAGCGAGCTAAATATAGAGTGGAAGCAAGCAATTTCTTCAACCGTC
CTTGGAAAAGTAATAGTTCAACCAGATCAGAATTTCACA
>Heavy Chain of Telisotuzumab IgG histidine scanning variant #1 (SEQ ID NO: 13)
QVQLVQSGAEVKKPGASVKVSCKASHYIFTAYTMHWVRQAPGQGLEWMGWIKPN
NGLANYAQKFQGRVTMTRDTSISTAYMELSRLRSDDTAVYYCARSEITTEFDYWGQ
GTLVTVSS
>Heavy Chain of Telisotuzumab IgG histidine scanning variant #2 (SEQ ID NO: 14)
QVQLVQSGAEVKKPGASVKVSCKASGHIFTAYTMHWVRQAPGQGLEWMGWIKPN
NGLANYAQKFQGRVTMTRDTSISTAYMELSRLRSDDTAVYYCARSEITTEFDYWGQ
GTLVTVSS
>Heavy Chain of Telisotuzumab IgG histidine scanning variant #3 (SEQ ID NO: 15)
QVQLVQSGAEVKKPGASVKVSCKASGYHFTAYTMHWVRQAPGQGLEWMGWIKPN
NGLANYAQKFQGRVTMTRDTSISTAYMELSRLRSDDTAVYYCARSEITTEFDYWGQ
GTLVTVSS
>Heavy Chain of Telisotuzumab IgG histidine scanning variant #4 (SEQ ID NO: 16)
QVQLVQSGAEVKKPGASVKVSCKASGYIHTAYTMHWVRQAPGQGLEWMGWIKPN
NGLANYAQKFQGRVTMTRDTSISTAYMELSRLRSDDTAVYYCARSEITTEFDYWGQ
GTLVTVSS
>Heavy Chain of Telisotuzumab IgG histidine scanning variant #5 (SEQ ID NO: 17)
QVQLVQSGAEVKKPGASVKVSCKASGYIFHAYTMHWVRQAPGQGLEWMGWIKPN
NGLANYAQKFQGRVTMTRDTSISTAYMELSRLRSDDTAVYYCARSEITTEFDYWGQ
GTLVTVSS
>Heavy Chain of Telisotuzumab IgG histidine scanning variant #6 (SEQ ID NO: 18)
QVQLVQSGAEVKKPGASVKVSCKASGYIFTHYTMHWVRQAPGQGLEWMGWIKPN
NGLANYAQKFQGRVTMTRDTSISTAYMELSRLRSDDTAVYYCARSEITTEFDYWGQ
GTLVTVSS
>Heavy Chain of Telisotuzumab IgG histidine scanning variant #7 (SEQ ID NO: 19)
QVQLVQSGAEVKKPGASVKVSCKASGYIFTAHTMHWVRQAPGQGLEWMGWIKPN
NGLANYAQKFQGRVTMTRDTSISTAYMELSRLRSDDTAVYYCARSEITTEFDYWGQ
GTLVTVSS
>Heavy Chain of Telisotuzumab IgG histidine scanning variant #8 (SEQ ID NO: 20)
QVQLVQSGAEVKKPGASVKVSCKASGYIFTAYHMHWVRQAPGQGLEWMGWIKPN
NGLANYAQKFQGRVTMTRDTSISTAYMELSRLRSDDTAVYYCARSEITTEFDYWGQ
GTLVTVSS
>Heavy Chain of Telisotuzumab IgG histidine scanning variant #9 (SEQ ID NO: 21)
QVQLVQSGAEVKKPGASVKVSCKASGYIFTAYTHHWVRQAPGQGLEWMGWIKPN
NGLANYAQKFQGRVTMTRDTSISTAYMELSRLRSDDTAVYYCARSEITTEFDYWGQ
GTLVTVSS
>Heavy Chain of Telisotuzumab IgG histidine scanning variant #10 (SEQ ID NO: 22)
QVQLVQSGAEVKKPGASVKVSCKASGYIFTAYTMAWVRQAPGQGLEWMGWIKPN
NGLANYAQKFQGRVTMTRDTSISTAYMELSRLRSDDTAVYYCARSEITTEFDYWGQ
GTLVTVSS
>Heavy Chain of Telisotuzumab IgG histidine scanning variant #11 (SEQ ID NO: 23)
QVQLVQSGAEVKKPGASVKVSCKASGYIFTAYTMHWVRQAPGQGLEWMGHIKPN
NGLANYAQKFQGRVTMTRDTSISTAYMELSRLRSDDTAVYYCARSEITTEFDYWGQ
GTLVTVSS
>Heavy Chain of Telisotuzumab IgG histidine scanning variant #12 (SEQ ID NO: 24)
QVQLVQSGAEVKKPGASVKVSCKASGYIFTAYTMHWVRQAPGQGLEWMGWHKPN
NGLANYAQKFQGRVTMTRDTSISTAYMELSRLRSDDTAVYYCARSEITTEFDYWGQ
GTLVTVSS
>Heavy Chain of Telisotuzumab IgG histidine scanning variant #13 (SEQ ID NO: 25)
QVQLVQSGAEVKKPGASVKVSCKASGYIFTAYTMHWVRQAPGQGLEWMGWIHPN
NGLANYAQKFQGRVTMTRDTSISTAYMELSRLRSDDTAVYYCARSEITTEFDYWGQ
GTLVTVSS
>Heavy Chain of Telisotuzumab IgG histidine scanning variant #14 (SEQ ID NO: 26)
QVQLVQSGAEVKKPGASVKVSCKASGYIFTAYTMHWVRQAPGQGLEWMGWIKHN
NGLANYAQKFQGRVTMTRDTSISTAYMELSRLRSDDTAVYYCARSEITTEFDYWGQ
GTLVTVSS
>Heavy Chain of Telisotuzumab IgG histidine scanning variant #15 (SEQ ID NO: 27)
QVQLVQSGAEVKKPGASVKVSCKASGYIFTAYTMHWVRQAPGQGLEWMGWIKPH
NGLANYAQKFQGRVTMTRDTSISTAYMELSRLRSDDTAVYYCARSEITTEFDYWGQ
GTLVTVSS
>Heavy Chain of Telisotuzumab IgG histidine scanning variant #16 (SEQ ID NO: 28)
QVQLVQSGAEVKKPGASVKVSCKASGYIFTAYTMHWVRQAPGQGLEWMGWIKPN
HGLANYAQKFQGRVTMTRDTSISTAYMELSRLRSDDTAVYYCARSEITTEFDYWGQ
GTLVTVSS
>Heavy Chain of Telisotuzumab IgG histidine scanning variant #17 (SEQ ID NO: 29)
QVQLVQSGAEVKKPGASVKVSCKASGYIFTAYTMHWVRQAPGQGLEWMGWIKPN
NHLANYAQKFQGRVTMTRDTSISTAYMELSRLRSDDTAVYYCARSEITTEFDYWGQ
GTLVTVSS
>Heavy Chain of Telisotuzumab IgG histidine scanning variant #18 (SEQ ID NO: 30)
QVQLVQSGAEVKKPGASVKVSCKASGYIFTAYTMHWVRQAPGQGLEWMGWIKPN
NGHANYAQKFQGRVTMTRDTSISTAYMELSRLRSDDTAVYYCARSEITTEFDYWGQ
GTLVTVSS
>Heavy Chain of Telisotuzumab IgG histidine scanning variant #19 (SEQ ID NO: 31)
QVQLVQSGAEVKKPGASVKVSCKASGYIFTAYTMHWVRQAPGQGLEWMGWIKPN
NGLHNYAQKFQGRVTMTRDTSISTAYMELSRLRSDDTAVYYCARSEITTEFDYWGQ
GTLVTVSS
>Heavy Chain of Telisotuzumab IgG histidine scanning variant #20 (SEQ ID NO: 32)
QVQLVQSGAEVKKPGASVKVSCKASGYIFTAYTMHWVRQAPGQGLEWMGWIKPN
NGLAHYAQKFQGRVTMTRDTSISTAYMELSRLRSDDTAVYYCARSEITTEFDYWGQ
GTLVTVSS
>Heavy Chain of Telisotuzumab IgG histidine scanning variant #21 (SEQ ID NO: 33)
QVQLVQSGAEVKKPGASVKVSCKASGYIFTAYTMHWVRQAPGQGLEWMGWIKPN
NGLANHAQKFQGRVTMTRDTSISTAYMELSRLRSDDTAVYYCARSEITTEFDYWGQ
GTLVTVSS
>Heavy Chain of Telisotuzumab IgG histidine scanning variant #22 (SEQ ID NO: 34)
QVQLVQSGAEVKKPGASVKVSCKASGYIFTAYTMHWVRQAPGQGLEWMGWIKPN
NGLANYHQKFQGRVTMTRDTSISTAYMELSRLRSDDTAVYYCARSEITTEFDYWGQ
GTLVTVSS
>Heavy Chain of Telisotuzumab IgG histidine scanning variant #23 (SEQ ID NO: 35)
QVQLVQSGAEVKKPGASVKVSCKASGYIFTAYTMHWVRQAPGQGLEWMGWIKPN
NGLANYAHKFQGRVTMTRDTSISTAYMELSRLRSDDTAVYYCARSEITTEFDYWGQ
GTLVTVSS
>Heavy Chain of Telisotuzumab IgG histidine scanning variant #24 (SEQ ID NO: 36)
QVQLVQSGAEVKKPGASVKVSCKASGYIFTAYTMHWVRQAPGQGLEWMGWIKPN
NGLANYAQHFQGRVTMTRDTSISTAYMELSRLRSDDTAVYYCARSEITTEFDYWGQ
GTLVTVSS
>Heavy Chain of Telisotuzumab IgG histidine scanning variant #25 (SEQ ID NO: 37)
QVQLVQSGAEVKKPGASVKVSCKASGYIFTAYTMHWVRQAPGQGLEWMGWIKPN
NGLANYAQKHQGRVTMTRDTSISTAYMELSRLRSDDTAVYYCARSEITTEFDYWGQ
GTLVTVSS
>Heavy Chain of Telisotuzumab IgG histidine scanning variant #26 (SEQ ID NO: 38)
QVQLVQSGAEVKKPGASVKVSCKASGYIFTAYTMHWVRQAPGQGLEWMGWIKPN
NGLANYAQKFHGRVTMTRDTSISTAYMELSRLRSDDTAVYYCARSEITTEFDYWGQ
GTLVTVSS
>Heavy Chain of Telisotuzumab IgG histidine scanning variant #27 (SEQ ID NO: 39)
QVQLVQSGAEVKKPGASVKVSCKASGYIFTAYTMHWVRQAPGQGLEWMGWIKPN
NGLANYAQKFQHRVTMTRDTSISTAYMELSRLRSDDTAVYYCARSEITTEFDYWGQ
GTLVTVSS
>Heavy Chain of Telisotuzumab IgG histidine scanning variant #28 (SEQ ID NO: 40)
QVQLVQSGAEVKKPGASVKVSCKASGYIFTAYTMHWVRQAPGQGLEWMGWIKPN
NGLANYAQKFQGRVTMTRDTSISTAYMELSRLRSDDTAVYYCHRSEITTEFDYWGQ
GTLVTVSS
>Heavy Chain of Telisotuzumab IgG histidine scanning variant #29 (SEQ ID NO: 41)
QVQLVQSGAEVKKPGASVKVSCKASGYIFTAYTMHWVRQAPGQGLEWMGWIKPN
NGLANYAQKFQGRVTMTRDTSISTAYMELSRLRSDDTAVYYCAHSEITTEFDYWGQ
GTLVTVSS
>Heavy Chain of Telisotuzumab IgG histidine scanning variant #30 (SEQ ID NO: 42)
QVQLVQSGAEVKKPGASVKVSCKASGYIFTAYTMHWVRQAPGQGLEWMGWIKPN
NGLANYAQKFQGRVTMTRDTSISTAYMELSRLRSDDTAVYYCARHEITTEFDYWGQ
GTLVTVSS
>Heavy Chain of Telisotuzumab IgG histidine scanning variant #31 (SEQ ID NO: 43)
QVQLVQSGAEVKKPGASVKVSCKASGYIFTAYTMHWVRQAPGQGLEWMGWIKPN
NGLANYAQKFQGRVTMTRDTSISTAYMELSRLRSDDTAVYYCARSHITTEFDYWGQ
GTLVTVSS
>Heavy Chain of Telisotuzumab IgG histidine scanning variant #32 (SEQ ID NO: 44)
QVQLVQSGAEVKKPGASVKVSCKASGYIFTAYTMHWVRQAPGQGLEWMGWIKPN
NGLANYAQKFQGRVTMTRDTSISTAYMELSRLRSDDTAVYYCARSEHTTEFDYWG
QGTLVTVSS
>Heavy Chain of Telisotuzumab IgG histidine scanning variant #33 (SEQ ID NO: 45)
QVQLVQSGAEVKKPGASVKVSCKASGYIFTAYTMHWVRQAPGQGLEWMGWIKPN
NGLANYAQKFQGRVTMTRDTSISTAYMELSRLRSDDTAVYYCARSEIHTEFDYWGQ
GTLVTVSS
>Heavy Chain of Telisotuzumab IgG histidine scanning variant #34 (SEQ ID NO: 46)
QVQLVQSGAEVKKPGASVKVSCKASGYIFTAYTMHWVRQAPGQGLEWMGWIKPN
NGLANYAQKFQGRVTMTRDTSISTAYMELSRLRSDDTAVYYCARSEITHEFDYWGQ
GTLVTVSS
>Heavy Chain of Telisotuzumab IgG histidine scanning variant #35 (SEQ ID NO: 47)
QVQLVQSGAEVKKPGASVKVSCKASGYIFTAYTMHWVRQAPGQGLEWMGWIKPN
NGLANYAQKFQGRVTMTRDTSISTAYMELSRLRSDDTAVYYCARSEITTHFDYWGQ
GTLVTVSS
>Heavy Chain of Telisotuzumab IgG histidine scanning variant #36 (SEQ ID NO: 48)
QVQLVQSGAEVKKPGASVKVSCKASGYIFTAYTMHWVRQAPGQGLEWMGWIKPN
NGLANYAQKFQGRVTMTRDTSISTAYMELSRLRSDDTAVYYCARSEITTEHDYWGQ
GTLVTVSS
>Heavy Chain of Telisotuzumab IgG histidine scanning variant #37 (SEQ ID NO: 49)
QVQLVQSGAEVKKPGASVKVSCKASGYIFTAYTMHWVRQAPGQGLEWMGWIKPN
NGLANYAQKFQGRVTMTRDTSISTAYMELSRLRSDDTAVYYCARSEITTEFHYWGQ
GTLVTVSS
>Heavy Chain of Telisotuzumab IgG histidine scanning variant #38 (SEQ ID NO: 50)
QVQLVQSGAEVKKPGASVKVSCKASGYIFTAYTMHWVRQAPGQGLEWMGWIKPN
NGLANYAQKFQGRVTMTRDTSISTAYMELSRLRSDDTAVYYCARSEITTEFDHWGQ
GTLVTVSS
>Light Chain of Telisotuzumab IgG histidine scanning variant #1 (SEQ ID NO: 51)
DIVMTQSPDSLAVSLGERATINCHSSESVDSYANSFLHWYQQKPGQPPKLLIYRASTR
ESGVPDRFSGSGSGTDFTLTISSLQAEDVAVYYCQQSKEDPLTFGGGTKVEIK
>Light Chain of Telisotuzumab IgG histidine scanning variant #2 (SEQ ID NO: 52)
DIVMTQSPDSLAVSLGERATINCKHSESVDSYANSFLHWYQQKPGQPPKLLIYRAST
RESGVPDRFSGSGSGTDFTLTISSLQAEDVAVYYCQQSKEDPLTFGGGTKVEIK
>Light Chain of Telisotuzumab IgG histidine scanning variant #3 (SEQ ID NO: 53)
DIVMTQSPDSLAVSLGERATINCKSHESVDSYANSFLHWYQQKPGQPPKLLIYRAST
RESGVPDRFSGSGSGTDFTLTISSLQAEDVAVYYCQQSKEDPLTFGGGTKVEIK
>Light Chain of Telisotuzumab IgG histidine scanning variant #4 (SEQ ID NO: 54)
DIVMTQSPDSLAVSLGERATINCKSSHSVDSYANSFLHWYQQKPGQPPKLLIYRASTR
ESGVPDRFSGSGSGTDFTLTISSLQAEDVAVYYCQQSKEDPLTFGGGTKVEIK
>Light Chain of Telisotuzumab IgG histidine scanning variant #5 (SEQ ID NO: 55)
DIVMTQSPDSLAVSLGERATINCKSSEHVDSYANSFLHWYQQKPGQPPKLLIYRAST
RESGVPDRFSGSGSGTDFTLTISSLQAEDVAVYYCQQSKEDPLTFGGGTKVEIK
>Light Chain of Telisotuzumab IgG histidine scanning variant #6 (SEQ ID NO: 56)
DIVMTQSPDSLAVSLGERATINCKSSESHDSYANSFLHWYQQKPGQPPKLLIYRASTR
ESGVPDRFSGSGSGTDFTLTISSLQAEDVAVYYCQQSKEDPLTFGGGTKVEIK
>Light Chain of Telisotuzumab IgG histidine scanning variant #7 (SEQ ID NO: 57)
DIVMTQSPDSLAVSLGERATINCKSSESVHSYANSFLHWYQQKPGQPPKLLIYRASTR
ESGVPDRFSGSGSGTDFTLTISSLQAEDVAVYYCQQSKEDPLTFGGGTKVEIK
>Light Chain of Telisotuzumab IgG histidine scanning variant #8 (SEQ ID NO: 58)
DIVMTQSPDSLAVSLGERATINCKSSESVDHYANSFLHWYQQKPGQPPKLLIYRAST
RESGVPDRFSGSGSGTDFTLTISSLQAEDVAVYYCQQSKEDPLTFGGGTKVEIK
>Light Chain of Telisotuzumab IgG histidine scanning variant #9 (SEQ ID NO: 59)
DIVMTQSPDSLAVSLGERATINCKSSESVDSHANSFLHWYQQKPGQPPKLLIYRASTR
ESGVPDRFSGSGSGTDFTLTISSLQAEDVAVYYCQQSKEDPLTFGGGTKVEIK
>Light Chain of Telisotuzumab IgG histidine scanning variant #10 (SEQ ID NO: 60)
DIVMTQSPDSLAVSLGERATINCKSSESVDSYHNSFLHWYQQKPGQPPKLLIYRASTR
ESGVPDRFSGSGSGTDFTLTISSLQAEDVAVYYCQQSKEDPLTFGGGTKVEIK
>Light Chain of Telisotuzumab IgG histidine scanning variant #11 (SEQ ID NO: 61)
DIVMTQSPDSLAVSLGERATINCKSSESVDSYAHSFLHWYQQKPGQPPKLLIYRASTR
ESGVPDRFSGSGSGTDFTLTISSLQAEDVAVYYCQQSKEDPLTFGGGTKVEIK
>Light Chain of Telisotuzumab IgG histidine scanning variant #12 (SEQ ID NO: 62)
DIVMTQSPDSLAVSLGERATINCKSSESVDSYANHFLHWYQQKPGQPPKLLIYRAST
RESGVPDRFSGSGSGTDFTLTISSLQAEDVAVYYCQQSKEDPLTFGGGTKVEIK
>Light Chain of Telisotuzumab IgG histidine scanning variant #13 (SEQ ID NO: 63)
DIVMTQSPDSLAVSLGERATINCKSSESVDSYANSHLHWYQQKPGQPPKLLIYRAST
RESGVPDRFSGSGSGTDFTLTISSLQAEDVAVYYCQQSKEDPLTFGGGTKVEIK
>Light Chain of Telisotuzumab IgG histidine scanning variant #14 (SEQ ID NO: 64)
DIVMTQSPDSLAVSLGERATINCKSSESVDSYANSFHHWYQQKPGQPPKLLIYRASTR
ESGVPDRFSGSGSGTDFTLTISSLQAEDVAVYYCQQSKEDPLTFGGGTKVEIK
>Light Chain of Telisotuzumab IgG histidine scanning variant #15 (SEQ ID NO: 65)
DIVMTQSPDSLAVSLGERATINCKSSESVDSYANSFLAWYQQKPGQPPKLLIYRASTR
ESGVPDRFSGSGSGTDFTLTISSLQAEDVAVYYCQQSKEDPLTFGGGTKVEIK
>Light Chain of Telisotuzumab IgG histidine scanning variant #16 (SEQ ID NO: 66)
DIVMTQSPDSLAVSLGERATINCKSSESVDSYANSFLHWYQQKPGQPPKLLIYHASTR
ESGVPDRFSGSGSGTDFTLTISSLQAEDVAVYYCQQSKEDPLTFGGGTKVEIK
>Light Chain of Telisotuzumab IgG histidine scanning variant #17 (SEQ ID NO: 67)
DIVMTQSPDSLAVSLGERATINCKSSESVDSYANSFLHWYQQKPGQPPKLLIYRHSTR
ESGVPDRFSGSGSGTDFTLTISSLQAEDVAVYYCQQSKEDPLTFGGGTKVEIK
>Light Chain of Telisotuzumab IgG histidine scanning variant #18 (SEQ ID NO: 68)
DIVMTQSPDSLAVSLGERATINCKSSESVDSYANSFLHWYQQKPGQPPKLLIYRAHT
RESGVPDRFSGSGSGTDFTLTISSLQAEDVAVYYCQQSKEDPLTFGGGTKVEIK
>Light Chain of Telisotuzumab IgG histidine scanning variant #19 (SEQ ID NO: 69)
DIVMTQSPDSLAVSLGERATINCKSSESVDSYANSFLHWYQQKPGQPPKLLIYRASHR
ESGVPDRFSGSGSGTDFTLTISSLQAEDVAVYYCQQSKEDPLTFGGGTKVEIK
>Light Chain of Telisotuzumab IgG histidine scanning variant #20 (SEQ ID NO: 70)
DIVMTQSPDSLAVSLGERATINCKSSESVDSYANSFLHWYQQKPGQPPKLLIYRASTH
ESGVPDRFSGSGSGTDFTLTISSLQAEDVAVYYCQQSKEDPLTFGGGTKVEIK
>Light Chain of Telisotuzumab IgG histidine scanning variant #21 (SEQ ID NO: 71)
DIVMTQSPDSLAVSLGERATINCKSSESVDSYANSFLHWYQQKPGQPPKLLIYRASTR
HSGVPDRFSGSGSGTDFTLTISSLQAEDVAVYYCQQSKEDPLTFGGGTKVEIK
>Light Chain of Telisotuzumab IgG histidine scanning variant #22 (SEQ ID NO: 72)
DIVMTQSPDSLAVSLGERATINCKSSESVDSYANSFLHWYQQKPGQPPKLLIYRASTR
EHGVPDRFSGSGSGTDFTLTISSLQAEDVAVYYCQQSKEDPLTFGGGTKVEIK
>Light Chain of Telisotuzumab IgG histidine scanning variant #23 (SEQ ID NO: 73)
DIVMTQSPDSLAVSLGERATINCKSSESVDSYANSFLHWYQQKPGQPPKLLIYRASTR
ESGVPDRFSGSGSGTDFTLTISSLQAEDVAVYYCHQSKEDPLTFGGGTKVEIK
>Light Chain of Telisotuzumab IgG histidine scanning variant #24 (SEQ ID NO: 74)
DIVMTQSPDSLAVSLGERATINCKSSESVDSYANSFLHWYQQKPGQPPKLLIYRASTR
ESGVPDRFSGSGSGTDFTLTISSLQAEDVAVYYCQHSKEDPLTFGGGTKVEIK
>Light Chain of Telisotuzumab IgG histidine scanning variant #25 (SEQ ID NO: 75)
DIVMTQSPDSLAVSLGERATINCKSSESVDSYANSFLHWYQQKPGQPPKLLIYRASTR
ESGVPDRFSGSGSGTDFTLTISSLQAEDVAVYYCQQHKEDPLTFGGGTKVEIK
>Light Chain of Telisotuzumab IgG histidine scanning variant #26 (SEQ ID NO: 76)
DIVMTQSPDSLAVSLGERATINCKSSESVDSYANSFLHWYQQKPGQPPKLLIYRASTR
ESGVPDRFSGSGSGTDFTLTISSLQAEDVAVYYCQQSHEDPLTFGGGTKVEIK
>Light Chain of Telisotuzumab IgG histidine scanning variant #27 (SEQ ID NO: 77)
DIVMTQSPDSLAVSLGERATINCKSSESVDSYANSFLHWYQQKPGQPPKLLIYRASTR
ESGVPDRFSGSGSGTDFTLTISSLQAEDVAVYYCQQSKHDPLTFGGGTKVEIK
>Light Chain of Telisotuzumab IgG histidine scanning variant #28 (SEQ ID NO: 78)
DIVMTQSPDSLAVSLGERATINCKSSESVDSYANSFLHWYQQKPGQPPKLLIYRASTR
ESGVPDRFSGSGSGTDFTLTISSLQAEDVAVYYCQQSKEHPLTFGGGTKVEIK
>Light Chain of Telisotuzumab IgG histidine scanning variant #29 (SEQ ID NO: 79)
DIVMTQSPDSLAVSLGERATINCKSSESVDSYANSFLHWYQQKPGQPPKLLIYRASTR
ESGVPDRFSGSGSGTDFTLTISSLQAEDVAVYYCQQSKEDHLTFGGGTKVEIK
>Light Chain of Telisotuzumab IgG histidine scanning variant #30 (SEQ ID NO: 80)
DIVMTQSPDSLAVSLGERATINCKSSESVDSYANSFLHWYQQKPGQPPKLLIYRASTR
ESGVPDRFSGSGSGTDFTLTISSLQAEDVAVYYCQQSKEDPHTFGGGTKVEIK
>Light Chain of Telisotuzumab IgG histidine scanning variant #31 (SEQ ID NO: 81)
DIVMTQSPDSLAVSLGERATINCKSSESVDSYANSFLHWYQQKPGQPPKLLIYRASTR
ESGVPDRFSGSGSGTDFTLTISSLQAEDVAVYYCQQSKEDPLHFGGGTKVEIK
>Heavy Chain Combinations of Telisotuzumab IgG histidine scanning variant #1 (SEQ ID
NO: 82)
QVQLVQSGAEVKKPGASVKVSCKASGHIFTAYTMHWVRQAPGQGLEWMGWIKPN
NGLANYAQKFQGRVTMTRDTSISTAYMELSRLRSDDTAVYYCARHEITTEFDYWGQ
GTLVTVSS
>Heavy Chain Combinations of Telisotuzumab IgG histidine scanning variant #2 (SEQ ID
NO: 83)
QVQLVQSGAEVKKPGASVKVSCKASGHIFTAYTMHWVRQAPGQGLEWMGWIKPN
NGLANYAQKFQGRVTMTRDTSISTAYMELSRLRSDDTAVYYCARSEITHEFDYWGQ
GTLVTVSS
>Heavy Chain Combinations of Telisotuzumab IgG histidine scanning variant #3 (SEQ ID
NO: 84)
QVQLVQSGAEVKKPGASVKVSCKASGHIFTAYTMHWVRQAPGQGLEWMGWIKPN
NGLANYAQKFQGRVTMTRDTSISTAYMELSRLRSDDTAVYYCARSEITTEFDHWGQ
GTLVTVSS
>Heavy Chain Combinations of Telisotuzumab IgG histidine scanning variant #4 (SEQ ID
NO: 85)
QVQLVQSGAEVKKPGASVKVSCKASGYIFTAYTMHWVRQAPGQGLEWMGWIKPN
NGLANYAQKFQGRVTMTRDTSISTAYMELSRLRSDDTAVYYCARHEITHEFDYWGQ
GTLVTVSS
>Heavy Chain Combinations of Telisotuzumab IgG histidine scanning variant #5 (SEQ ID
NO: 86)
QVQLVQSGAEVKKPGASVKVSCKASGYIFTAYTMHWVRQAPGQGLEWMGWIKPN
NGLANYAQKFQGRVTMTRDTSISTAYMELSRLRSDDTAVYYCARHEITTEFDHWGQ
GTLVTVSS
>Heavy Chain Combinations of Telisotuzumab IgG histidine scanning variant #6 (SEQ ID
NO: 87)
QVQLVQSGAEVKKPGASVKVSCKASGYIFTAYTMHWVRQAPGQGLEWMGWIKPN
NGLANYAQKFQGRVTMTRDTSISTAYMELSRLRSDDTAVYYCARSEITHEFDHWGQ
GTLVTVSS
>Heavy Chain Combinations of Telisotuzumab IgG histidine scanning variant #7 (SEQ ID
NO: 88)
QVQLVQSGAEVKKPGASVKVSCKASGHIFTAYTMHWVRQAPGQGLEWMGWIKPN
NGLANYAQKFQGRVTMTRDTSISTAYMELSRLRSDDTAVYYCARHEITHEFDYWGQ
GTLVTVSS
>Heavy Chain Combinations of Telisotuzumab IgG histidine scanning variant #8 (SEQ ID
NO: 89)
QVQLVQSGAEVKKPGASVKVSCKASGHIFTAYTMHWVRQAPGQGLEWMGWIKPN
NGLANYAQKFQGRVTMTRDTSISTAYMELSRLRSDDTAVYYCARHEITTEFDHWGQ
GTLVTVSS
>Heavy Chain Combinations of Telisotuzumab IgG histidine scanning variant #9 (SEQ ID
NO: 90)
QVQLVQSGAEVKKPGASVKVSCKASGHIFTAYTMHWVRQAPGQGLEWMGWIKPN
NGLANYAQKFQGRVTMTRDTSISTAYMELSRLRSDDTAVYYCARSEITHEFDHWGQ
GTLVTVSS
>Heavy Chain Combinations of Telisotuzumab IgG histidine scanning variant #10 (SEQ ID
NO: 91)
QVQLVQSGAEVKKPGASVKVSCKASGYIFTAYTMHWVRQAPGQGLEWMGWIKPN
NGLANYAQKFQGRVTMTRDTSISTAYMELSRLRSDDTAVYYCARHEITHEFDHWGQ
GTLVTVSS
>Heavy Chain Combinations of Telisotuzumab IgG histidine scanning variant #11 (SEQ ID
NO: 92)
QVQLVQSGAEVKKPGASVKVSCKASGHIFTAYTMHWVRQAPGQGLEWMGWIKPN
NGLANYAQKFQGRVTMTRDTSISTAYMELSRLRSDDTAVYYCHRSEITTEFDYWGQ
GTLVTVSS
>Heavy Chain Combinations of Telisotuzumab IgG histidine scanning variant #12 (SEQ ID
NO: 93)
QVQLVQSGAEVKKPGASVKVSCKASGYIFTAYTMHWVRQAPGQGLEWMGWIKPN
NGLANYAQKFQGRVTMTRDTSISTAYMELSRLRSDDTAVYYCHRHEITTEFDYWGQ
GTLVTVSS
>Heavy Chain Combinations of Telisotuzumab IgG histidine scanning variant #13 (SEQ ID
NO: 94)
QVQLVQSGAEVKKPGASVKVSCKASGYIFTAYTMHWVRQAPGQGLEWMGWIKPN
NGLANYAQKFQGRVTMTRDTSISTAYMELSRLRSDDTAVYYCHRSEITHEFDYWGQ
GTLVTVSS
>Heavy Chain Combinations of Telisotuzumab IgG histidine scanning variant #14 (SEQ ID
NO: 95)
QVQLVQSGAEVKKPGASVKVSCKASGYIFTAYTMHWVRQAPGQGLEWMGWIKPN
NGLANYAQKFQGRVTMTRDTSISTAYMELSRLRSDDTAVYYCHRSEITTEFDHWGQ
GTLVTVSS
>Heavy Chain Combinations of Telisotuzumab IgG histidine scanning variant #15 (SEQ ID
NO: 96)
QVQLVQSGAEVKKPGASVKVSCKASGHIFTAYTMHWVRQAPGQGLEWMGWIKPN
NGLANYAQKFQGRVTMTRDTSISTAYMELSRLRSDDTAVYYCAHSEITTEFDYWGQ
GTLVTVSS
>Heavy Chain Combinations of Telisotuzumab IgG histidine scanning variant #16 (SEQ ID
NO: 97)
QVQLVQSGAEVKKPGASVKVSCKASGYIFTAYTMHWVRQAPGQGLEWMGWIKPN
NGLANYAQKFQGRVTMTRDTSISTAYMELSRLRSDDTAVYYCAHHEITTEFDYWGQ
GTLVTVSS
>Heavy Chain Combinations of Telisotuzumab IgG histidine scanning variant #17 (SEQ ID
NO: 98)
QVQLVQSGAEVKKPGASVKVSCKASGYIFTAYTMHWVRQAPGQGLEWMGWIKPN
NGLANYAQKFQGRVTMTRDTSISTAYMELSRLRSDDTAVYYCAHSEITHEFDYWGQ
GTLVTVSS
>Heavy Chain Combinations of Telisotuzumab IgG histidine scanning variant #18 (SEQ ID
NO: 99)
QVQLVQSGAEVKKPGASVKVSCKASGYIFTAYTMHWVRQAPGQGLEWMGWIKPN
NGLANYAQKFQGRVTMTRDTSISTAYMELSRLRSDDTAVYYCAHSEITTEFDHWGQ
GTLVTVSS
>Heavy Chain Combinations of Telisotuzumab IgG histidine scanning variant #19 (SEQ ID
NO: 100)
QVQLVQSGAEVKKPGASVKVSCKASGHIFTAYTMHWVRQAPGQGLEWMGWIKPN
NGLANYAQKFQGRVTMTRDTSISTAYMELSRLRSDDTAVYYCARSEIHTEFDYWGQ
GTLVTVSS
>Heavy Chain Combinations of Telisotuzumab IgG histidine scanning variant #20 (SEQ ID
NO: 101)
QVQLVQSGAEVKKPGASVKVSCKASGYIFTAYTMHWVRQAPGQGLEWMGWIKPN
NGLANYAQKFQGRVTMTRDTSISTAYMELSRLRSDDTAVYYCARHEIHTEFDYWGQ
GTLVTVSS
>Heavy Chain Combinations of Telisotuzumab IgG histidine scanning variant #21 (SEQ ID
NO: 102)
QVQLVQSGAEVKKPGASVKVSCKASGYIFTAYTMHWVRQAPGQGLEWMGWIKPN
NGLANYAQKFQGRVTMTRDTSISTAYMELSRLRSDDTAVYYCARSEIHHEFDYWGQ
GTLVTVSS
>Heavy Chain Combinations of Telisotuzumab IgG histidine scanning variant #22 (SEQ ID
NO: 103)
QVQLVQSGAEVKKPGASVKVSCKASGYIFTAYTMHWVRQAPGQGLEWMGWIKPN
NGLANYAQKFQGRVTMTRDTSISTAYMELSRLRSDDTAVYYCARSEIHTEFDHWGQ
GTLVTVSS
>Heavy Chain Combinations of Telisotuzumab IgG histidine scanning variant #23 (SEQ ID
NO: 104)
QVQLVQSGAEVKKPGASVKVSCKASGHIFTAYTMHWVRQAPGQGLEWMGWIKPN
NGLANYAQKFQGRVTMTRDTSISTAYMELSRLRSDDTAVYYCHRSEITTEFDHWGQ
GTLVTVSS
>Heavy Chain Combinations of Telisotuzumab IgG histidine scanning variant #24 (SEQ ID
NO: 105)
QVQLVQSGAEVKKPGASVKVSCKASGYIFTAYTMHWVRQAPGQGLEWMGWIKPN
NGLANYAQKFQGRVTMTRDTSISTAYMELSRLRSDDTAVYYCHRHEITTEFDHWGQ
GTLVTVSS
>Heavy Chain Combinations of Telisotuzumab IgG histidine scanning variant #25 (SEQ ID
NO: 106)
QVQLVQSGAEVKKPGASVKVSCKASGYIFTAYTMHWVRQAPGQGLEWMGWIKPN
NGLANYAQKFQGRVTMTRDTSISTAYMELSRLRSDDTAVYYCHRSEITHEFDHWGQ
GTLVTVSS
>Heavy Chain Combinations of Telisotuzumab IgG histidine scanning variant #26 (SEQ ID
NO: 107)
QVQLVQSGAEVKKPGASVKVSCKASGHIFTAYTMHWVRQAPGQGLEWMGWIKPN
NGLANYAQKFQGRVTMTRDTSISTAYMELSRLRSDDTAVYYCHRHEITTEFDHWGQ
GTLVTVSS
>Heavy Chain Combinations of Telisotuzumab IgG histidine scanning variant #27 (SEQ ID
NO: 108)
QVQLVQSGAEVKKPGASVKVSCKASGHIFTAYTMHWVRQAPGQGLEWMGWIKPN
NGLANYAQKFQGRVTMTRDTSISTAYMELSRLRSDDTAVYYCHRSEITHEFDHWGQ
GTLVTVSS
>Heavy Chain Combinations of Telisotuzumab IgG histidine scanning variant #28 (SEQ ID
NO: 109)
QVQLVQSGAEVKKPGASVKVSCKASGHIFTAYTMHWVRQAPGQGLEWMGWIKPN
NGLANYAQKFQGRVTMTRDTSISTAYMELSRLRSDDTAVYYCAHSEITTEFDHWGQ
GTLVTVSS
>Heavy Chain Combinations of Telisotuzumab IgG histidine scanning variant #29 (SEQ ID
NO: 110)
QVQLVQSGAEVKKPGASVKVSCKASGYIFTAYTMHWVRQAPGQGLEWMGWIKPN
NGLANYAQKFQGRVTMTRDTSISTAYMELSRLRSDDTAVYYCAHHEITTEFDHWGQ
GTLVTVSS
>Heavy Chain Combinations of Telisotuzumab IgG histidine scanning variant #30 (SEQ ID
NO: 111)
QVQLVQSGAEVKKPGASVKVSCKASGYIFTAYTMHWVRQAPGQGLEWMGWIKPN
NGLANYAQKFQGRVTMTRDTSISTAYMELSRLRSDDTAVYYCAHSEITHEFDHWGQ
GTLVTVSS
>Heavy Chain Combinations of Telisotuzumab IgG histidine scanning variant #31 (SEQ ID
NO: 112)
QVQLVQSGAEVKKPGASVKVSCKASGHIFTAYTMHWVRQAPGQGLEWMGWIKPN
NGLANYAQKFQGRVTMTRDTSISTAYMELSRLRSDDTAVYYCAHHEITTEFDHWGQ
GTLVTVSS
>Heavy Chain Combinations of Telisotuzumab IgG histidine scanning variant #32 (SEQ ID
NO: 113)
QVQLVQSGAEVKKPGASVKVSCKASGHIFTAYTMHWVRQAPGQGLEWMGWIKPN
NGLANYAQKFQGRVTMTRDTSISTAYMELSRLRSDDTAVYYCAHSEITHEFDHWGQ
GTLVTVSS
>Heavy Chain Combinations of Telisotuzumab IgG histidine scanning variant #33 (SEQ ID
NO: 114)
QVQLVQSGAEVKKPGASVKVSCKASGHIFTAYTMHWVRQAPGQGLEWMGWIKPN
NGLANYAQKFQGRVTMTRDTSISTAYMELSRLRSDDTAVYYCARSEIHTEFDHWGQ
GTLVTVSS
>Heavy Chain Combinations of Telisotuzumab IgG histidine scanning variant #34 (SEQ ID
NO: 115)
QVQLVQSGAEVKKPGASVKVSCKASGYIFTAYTMHWVRQAPGQGLEWMGWIKPN
NGLANYAQKFQGRVTMTRDTSISTAYMELSRLRSDDTAVYYCARHEIHTEFDHWGQ
GTLVTVSS
>Heavy Chain Combinations of Telisotuzumab IgG histidine scanning variant #35 (SEQ ID
NO: 116)
QVQLVQSGAEVKKPGASVKVSCKASGYIFTAYTMHWVRQAPGQGLEWMGWIKPN
NGLANYAQKFQGRVTMTRDTSISTAYMELSRLRSDDTAVYYCARSEIHHEFDHWGQ
GTLVTVSS
>Heavy Chain Combinations of Telisotuzumab IgG histidine scanning variant #36 (SEQ ID
NO: 117)
QVQLVQSGAEVKKPGASVKVSCKASGHIFTAYTMHWVRQAPGQGLEWMGWIKPN
NGLANYAQKFQGRVTMTRDTSISTAYMELSRLRSDDTAVYYCARHEIHTEFDHWGQ
GTLVTVSS
>Heavy Chain Combinations of Telisotuzumab IgG histidine scanning variant #37 (SEQ ID
NO: 118)
QVQLVQSGAEVKKPGASVKVSCKASGHIFTAYTMHWVRQAPGQGLEWMGWIKPN
NGLANYAQKFQGRVTMTRDTSISTAYMELSRLRSDDTAVYYCARSEIHHEFDHWGQ
GTLVTVSS
>Heavy Chain Combinations of Telisotuzumab IgG histidine scanning variant #38 (SEQ ID
NO: 119)
QVQLVQSGAEVKKPGASVKVSCKASGYIFTAYTMHWVRQAPGQGLEWMGWIKPN
NGLANYAQKFQGRVTMTRDTSISTAYMELSRLRSDDTAVYYCHHSEITTEFDYWGQ
GTLVTVSS
>Heavy Chain Combinations of Telisotuzumab IgG histidine scanning variant #39 (SEQ ID
NO: 120)
QVQLVQSGAEVKKPGASVKVSCKASGYIFTAYTMHWVRQAPGQGLEWMGWIKPN
NGLANYAQKFQGRVTMTRDTSISTAYMELSRLRSDDTAVYYCAHSEIHTEFDYWGQ
GTLVTVSS
>Heavy Chain Combinations of Telisotuzumab IgG histidine scanning variant #40 (SEQ ID
NO: 121)
QVQLVQSGAEVKKPGASVKVSCKASGYIFTAYTMHWVRQAPGQGLEWMGWIKPN
NGLANYAQKFQGRVTMTRDTSISTAYMELSRLRSDDTAVYYCHRSEIHTEFDYWGQ
GTLVTVSS
>Heavy Chain Combinations of Telisotuzumab IgG histidine scanning variant #41 (SEQ ID
NO: 122)
QVQLVQSGAEVKKPGASVKVSCKASGYIFTAYTMHWVRQAPGQGLEWMGWIKPN
NGLANYAQKFQGRVTMTRDTSISTAYMELSRLRSDDTAVYYCHHSEIHTEFDYWGQ
GTLVTVSS
>Heavy Chain Combinations of Telisotuzumab IgG histidine scanning variant #42 (SEQ ID
NO: 123)
QVQLVQSGAEVKKPGASVKVSCKASGHIFTAYTMHWVRQAPGQGLEWMGWIKPN
NGLANYAQKFQGRVTMTRDTSISTAYMELSRLRSDDTAVYYCHHSEITTEFDYWGQ
GTLVTVSS
>Heavy Chain Combinations of Telisotuzumab IgG histidine scanning variant #43 (SEQ ID
NO: 124)
QVQLVQSGAEVKKPGASVKVSCKASGYIFTAYTMHWVRQAPGQGLEWMGWIKPN
NGLANYAQKFQGRVTMTRDTSISTAYMELSRLRSDDTAVYYCHHHEITTEFDYWGQ
GTLVTVSS
>Heavy Chain Combinations of Telisotuzumab IgG histidine scanning variant #44 (SEQ ID
NO: 125)
QVQLVQSGAEVKKPGASVKVSCKASGYIFTAYTMHWVRQAPGQGLEWMGWIKPN
NGLANYAQKFQGRVTMTRDTSISTAYMELSRLRSDDTAVYYCHHSEITHEFDYWGQ
GTLVTVSS
>Heavy Chain Combinations of Telisotuzumab IgG histidine scanning variant #45 (SEQ ID
NO: 126)
QVQLVQSGAEVKKPGASVKVSCKASGYIFTAYTMHWVRQAPGQGLEWMGWIKPN
NGLANYAQKFQGRVTMTRDTSISTAYMELSRLRSDDTAVYYCHHSEITTEFDHWGQ
GTLVTVSS
>Heavy Chain Combinations of Telisotuzumab IgG histidine scanning variant #46 (SEQ ID
NO: 127)
QVQLVQSGAEVKKPGASVKVSCKASGHIFTAYTMHWVRQAPGQGLEWMGWIKPN
NGLANYAQKFQGRVTMTRDTSISTAYMELSRLRSDDTAVYYCHRSEIHTEFDYWGQ
GTLVTVSS
>Heavy Chain Combinations of Telisotuzumab IgG histidine scanning variant #47 (SEQ ID
NO: 128)
QVQLVQSGAEVKKPGASVKVSCKASGYIFTAYTMHWVRQAPGQGLEWMGWIKPN
NGLANYAQKFQGRVTMTRDTSISTAYMELSRLRSDDTAVYYCHRHEIHTEFDYWGQ
GTLVTVSS
>Heavy Chain Combinations of Telisotuzumab IgG histidine scanning variant #48 (SEQ ID
NO: 129)
QVQLVQSGAEVKKPGASVKVSCKASGYIFTAYTMHWVRQAPGQGLEWMGWIKPN
NGLANYAQKFQGRVTMTRDTSISTAYMELSRLRSDDTAVYYCHRSEIHHEFDYWGQ
GTLVTVSS
>Heavy Chain Combinations of Telisotuzumab IgG histidine scanning variant #49 (SEQ ID
NO: 130)
QVQLVQSGAEVKKPGASVKVSCKASGYIFTAYTMHWVRQAPGQGLEWMGWIKPN
NGLANYAQKFQGRVTMTRDTSISTAYMELSRLRSDDTAVYYCHRSEIHTEFDHWGQ
GTLVTVSS
>Light Chain Combinations of Telisotuzumab IgG histidine scanning variant #1 (SEQ ID
NO: 131)
DIVMTQSPDSLAVSLGERATINCKSSESVDSYAHSHLHWYQQKPGQPPKLLIYRAST
RESGVPDRFSGSGSGTDFTLTISSLQAEDVAVYYCQQSKEDPLTFGGGTKVEIK
>Light Chain Combinations of Telisotuzumab IgG histidine scanning variant #2 (SEQ ID
NO: 132)
DIVMTQSPDSLAVSLGERATINCKSSESVDSYAHSFLHWYQQKPGQPPKLLIYHASTR
ESGVPDRFSGSGSGTDFTLTISSLQAEDVAVYYCQQSKEDPLTFGGGTKVEIK
>Light Chain Combinations of Telisotuzumab IgG histidine scanning variant #3 (SEQ ID
NO: 133)
DIVMTQSPDSLAVSLGERATINCKSSESVDSYAHSFLHWYQQKPGQPPKLLIYRASTR
EHGVPDRFSGSGSGTDFTLTISSLQAEDVAVYYCQQSKEDPLTFGGGTKVEIK
>Light Chain Combinations of Telisotuzumab IgG histidine scanning variant #4 (SEQ ID
NO: 134)
DIVMTQSPDSLAVSLGERATINCKSSESVDSYANSHLHWYQQKPGQPPKLLIYHAST
RESGVPDRFSGSGSGTDFTLTISSLQAEDVAVYYCQQSKEDPLTFGGGTKVEIK
>Light Chain Combinations of Telisotuzumab IgG histidine scanning variant #5 (SEQ ID
NO: 135)
DIVMTQSPDSLAVSLGERATINCKSSESVDSYANSHLHWYQQKPGQPPKLLIYRAST
REHGVPDRFSGSGSGTDFTLTISSLQAEDVAVYYCQQSKEDPLTFGGGTKVEIK
>Light Chain Combinations of Telisotuzumab IgG histidine scanning variant #6 (SEQ ID
NO: 136)
DIVMTQSPDSLAVSLGERATINCKSSESVDSYANSFLHWYQQKPGQPPKLLIYHASTR
EHGVPDRFSGSGSGTDFTLTISSLQAEDVAVYYCQQSKEDPLTFGGGTKVEIK
>Light Chain Combinations of Telisotuzumab IgG histidine scanning variant #7 (SEQ ID
NO: 137)
DIVMTQSPDSLAVSLGERATINCKSSESVDSYAHSHLHWYQQKPGQPPKLLIYHAST
RESGVPDRFSGSGSGTDFTLTISSLQAEDVAVYYCQQSKEDPLTFGGGTKVEIK
>Light Chain Combinations of Telisotuzumab IgG histidine scanning variant #8 (SEQ ID
NO: 138)
DIVMTQSPDSLAVSLGERATINCKSSESVDSYAHSHLHWYQQKPGQPPKLLIYRAST
REHGVPDRFSGSGSGTDFTLTISSLQAEDVAVYYCQQSKEDPLTFGGGTKVEIK
>Light Chain Combinations of Telisotuzumab IgG histidine scanning variant #9 (SEQ ID
NO: 139)
DIVMTQSPDSLAVSLGERATINCKSSESVDSYAHSFLHWYQQKPGQPPKLLIYHASTR
EHGVPDRFSGSGSGTDFTLTISSLQAEDVAVYYCQQSKEDPLTFGGGTKVEIK
>Light Chain Combinations of Telisotuzumab IgG histidine scanning variant #10 (SEQ ID
NO: 140)
DIVMTQSPDSLAVSLGERATINCKSSESVDSYANSHLHWYQQKPGQPPKLLIYHAST
REHGVPDRFSGSGSGTDFTLTISSLQAEDVAVYYCQQSKEDPLTFGGGTKVEIK
>Light Chain Combinations of Telisotuzumab IgG histidine scanning variant #11 (SEQ ID
NO: 141)
DIVMTQSPDSLAVSLGERATINCKSSESVDSYAHSFLHWYQQKPGQPPKLLIYRASTR
HSGVPDRFSGSGSGTDFTLTISSLQAEDVAVYYCQQSKEDPLTFGGGTKVEIK
>Light Chain Combinations of Telisotuzumab IgG histidine scanning variant #12 (SEQ ID
NO: 142)
DIVMTQSPDSLAVSLGERATINCKSSESVDSYANSHLHWYQQKPGQPPKLLIYRAST
RHSGVPDRFSGSGSGTDFTLTISSLQAEDVAVYYCQQSKEDPLTFGGGTKVEIK
>Light Chain Combinations of Telisotuzumab IgG histidine scanning variant #13 (SEQ ID
NO: 143)
DIVMTQSPDSLAVSLGERATINCKSSESVDSYANSFHHWYQQKPGQPPKLLIYRASTR
HSGVPDRFSGSGSGTDFTLTISSLQAEDVAVYYCQQSKEDPLTFGGGTKVEIK
>Light Chain Combinations of Telisotuzumab IgG histidine scanning variant #14 (SEQ ID
NO: 144)
DIVMTQSPDSLAVSLGERATINCKSSESVDSYANSFLHWYQQKPGQPPKLLIYHASTR
HSGVPDRFSGSGSGTDFTLTISSLQAEDVAVYYCQQSKEDPLTFGGGTKVEIK
>Light Chain Combinations of Telisotuzumab IgG histidine scanning variant #15 (SEQ ID
NO: 145)
DIVMTQSPDSLAVSLGERATINCKSSESVDSYANSFLHWYQQKPGQPPKLLIYRASTR
HHGVPDRFSGSGSGTDFTLTISSLQAEDVAVYYCQQSKEDPLTFGGGTKVEIK
>Heavy Chain of Emibetuzumab IgG (SEQ ID NO: 146)
QVQLVQSGAEVKKPGASVKVSCKASGYTFTDYYMHWVRQAPGQGLEWMGRVNP
NRRGTTYNQKFEGRVTMTTDTSTSTAYMELRSLRSDDTAVYYCARANWLDYWGQ
GTTVTVSS
>Light Chain of Emibetuzumab IgG (SEQ ID NO: 147)
[sequence omitted]
>Heavy Chain CDR1 of Emibetuzumab (SEQ ID NO: 148)
GYTFTDYYMH
>Heavy Chain CDR2 of Emibetuzumab (SEQ ID NO: 149)
RVNPNRRGTTYNQKFEG
>Heavy Chain CDR3 of Emibetuzumab (SEQ ID NO: 150)
ARANWLDY
>Light Chain CDR1 of Emibetuzumab (SEQ ID NO: 151)
SVSSSVSSIYLH
>Light Chain CDR2 of Emibetuzumab (SEQ ID NO: 152)
STSNLAS
>Light Chain CDR3 of Emibetuzumab (SEQ ID NO: 153)
QVYSGYPLT
>Heavy Chain of Emibetuzumab IgG histidine scanning variant #1 (SEQ ID NO: 154)
QVQLVQSGAEVKKPGASVKVSCKASHYTFTDYYMHWVRQAPGQGLEWMGRVNP
NRRGTTYNQKFEGRVTMTTDTSTSTAYMELRSLRSDDTAVYYCARANWLDYWGQ
GTTVTVSS
>Heavy Chain of Emibetuzumab IgG histidine scanning variant #2 (SEQ ID NO: 155)
QVQLVQSGAEVKKPGASVKVSCKASGHTFTDYYMHWVRQAPGQGLEWMGRVNP
NRRGTTYNQKFEGRVTMTTDTSTSTAYMELRSLRSDDTAVYYCARANWLDYWGQ
GTTVTVSS
>Heavy Chain of Emibetuzumab IgG histidine scanning variant #3 (SEQ ID NO: 156)
QVQLVQSGAEVKKPGASVKVSCKASGYHFTDYYMHWVRQAPGQGLEWMGRVNP
NRRGTTYNQKFEGRVTMTTDTSTSTAYMELRSLRSDDTAVYYCARANWLDYWGQ
GTTVTVSS
>Heavy Chain of Emibetuzumab IgG histidine scanning variant #4 (SEQ ID NO: 157)
QVQLVQSGAEVKKPGASVKVSCKASGYTHTDYYMHWVRQAPGQGLEWMGRVNP
NRRGTTYNQKFEGRVTMTTDTSTSTAYMELRSLRSDDTAVYYCARANWLDYWGQ
GTTVTVSS
>Heavy Chain of Emibetuzumab IgG histidine scanning variant #5 (SEQ ID NO: 158)
QVQLVQSGAEVKKPGASVKVSCKASGYTFHDYYMHWVRQAPGQGLEWMGRVNP
NRRGTTYNQKFEGRVTMTTDTSTSTAYMELRSLRSDDTAVYYCARANWLDYWGQ
GTTVTVSS
>Heavy Chain of Emibetuzumab IgG histidine scanning variant #6 (SEQ ID NO: 159)
QVQLVQSGAEVKKPGASVKVSCKASGYTFTHYYMHWVRQAPGQGLEWMGRVNP
NRRGTTYNQKFEGRVTMTTDTSTSTAYMELRSLRSDDTAVYYCARANWLDYWGQ
GTTVTVSS
>Heavy Chain of Emibetuzumab IgG histidine scanning variant #7 (SEQ ID NO: 160)
QVQLVQSGAEVKKPGASVKVSCKASGYTFTDHYMHWVRQAPGQGLEWMGRVNP
NRRGTTYNQKFEGRVTMTTDTSTSTAYMELRSLRSDDTAVYYCARANWLDYWGQ
GTTVTVSS
>Heavy Chain of Emibetuzumab IgG histidine scanning variant #8 (SEQ ID NO: 161)
QVQLVQSGAEVKKPGASVKVSCKASGYTFTDYHMHWVRQAPGQGLEWMGRVNP
NRRGTTYNQKFEGRVTMTTDTSTSTAYMELRSLRSDDTAVYYCARANWLDYWGQ
GTTVTVSS
>Heavy Chain of Emibetuzumab IgG histidine scanning variant #9 (SEQ ID NO: 162)
QVQLVQSGAEVKKPGASVKVSCKASGYTFTDYYHHWVRQAPGQGLEWMGRVNPN
RRGTTYNQKFEGRVTMTTDTSTSTAYMELRSLRSDDTAVYYCARANWLDYWGQG
TTVTVSS
>Heavy Chain of Emibetuzumab IgG histidine scanning variant #10 (SEQ ID NO: 163)
QVQLVQSGAEVKKPGASVKVSCKASGYTFTDYYMAWVRQAPGQGLEWMGRVNP
NRRGTTYNQKFEGRVTMTTDTSTSTAYMELRSLRSDDTAVYYCARANWLDYWGQ
GTTVTVSS
>Heavy Chain of Emibetuzumab IgG histidine scanning variant #11 (SEQ ID NO: 164)
QVQLVQSGAEVKKPGASVKVSCKASGYTFTDYYMHWVRQAPGQGLEWMGHVNP
NRRGTTYNQKFEGRVTMTTDTSTSTAYMELRSLRSDDTAVYYCARANWLDYWGQ
GTTVTVSS
>Heavy Chain of Emibetuzumab IgG histidine scanning variant #12 (SEQ ID NO: 165)
QVQLVQSGAEVKKPGASVKVSCKASGYTFTDYYMHWVRQAPGQGLEWMGRHNP
NRRGTTYNQKFEGRVTMTTDTSTSTAYMELRSLRSDDTAVYYCARANWLDYWGQ
GTTVTVSS
>Heavy Chain of Emibetuzumab IgG histidine scanning variant #13 (SEQ ID NO: 166)
QVQLVQSGAEVKKPGASVKVSCKASGYTFTDYYMHWVRQAPGQGLEWMGRVHP
NRRGTTYNQKFEGRVTMTTDTSTSTAYMELRSLRSDDTAVYYCARANWLDYWGQ
GTTVTVSS
>Heavy Chain of Emibetuzumab IgG histidine scanning variant #14 (SEQ ID NO: 167)
QVQLVQSGAEVKKPGASVKVSCKASGYTFTDYYMHWVRQAPGQGLEWMGRVNH
NRRGTTYNQKFEGRVTMTTDTSTSTAYMELRSLRSDDTAVYYCARANWLDYWGQ
GTTVTVSS
>Heavy Chain of Emibetuzumab IgG histidine scanning variant #15 (SEQ ID NO: 168)
QVQLVQSGAEVKKPGASVKVSCKASGYTFTDYYMHWVRQAPGQGLEWMGRVNP
HRRGTTYNQKFEGRVTMTTDTSTSTAYMELRSLRSDDTAVYYCARANWLDYWGQ
GTTVTVSS
>Heavy Chain of Emibetuzumab IgG histidine scanning variant #16 (SEQ ID NO: 169)
QVQLVQSGAEVKKPGASVKVSCKASGYTFTDYYMHWVRQAPGQGLEWMGRVNP
NHRGTTYNQKFEGRVTMTTDTSTSTAYMELRSLRSDDTAVYYCARANWLDYWGQ
GTTVTVSS
>Heavy Chain of Emibetuzumab IgG histidine scanning variant #17 (SEQ ID NO: 170)
QVQLVQSGAEVKKPGASVKVSCKASGYTFTDYYMHWVRQAPGQGLEWMGRVNP
NRHGTTYNQKFEGRVTMTTDTSTSTAYMELRSLRSDDTAVYYCARANWLDYWGQ
GTTVTVSS
>Heavy Chain of Emibetuzumab IgG histidine scanning variant #18 (SEQ ID NO: 171)
QVQLVQSGAEVKKPGASVKVSCKASGYTFTDYYMHWVRQAPGQGLEWMGRVNP
NRRHTTYNQKFEGRVTMTTDTSTSTAYMELRSLRSDDTAVYYCARANWLDYWGQ
GTTVTVSS
>Heavy Chain of Emibetuzumab IgG histidine scanning variant #19 (SEQ ID NO: 172)
QVQLVQSGAEVKKPGASVKVSCKASGYTFTDYYMHWVRQAPGQGLEWMGRVNP
NRRGHTYNQKFEGRVTMTTDTSTSTAYMELRSLRSDDTAVYYCARANWLDYWGQ
GTTVTVSS
>Heavy Chain of Emibetuzumab IgG histidine scanning variant #20 (SEQ ID NO: 173)
QVQLVQSGAEVKKPGASVKVSCKASGYTFTDYYMHWVRQAPGQGLEWMGRVNP
NRRGTHYNQKFEGRVTMTTDTSTSTAYMELRSLRSDDTAVYYCARANWLDYWGQ
GTTVTVSS
>Heavy Chain of Emibetuzumab IgG histidine scanning variant #21 (SEQ ID NO: 174)
QVQLVQSGAEVKKPGASVKVSCKASGYTFTDYYMHWVRQAPGQGLEWMGRVNP
NRRGTTHNQKFEGRVTMTTDTSTSTAYMELRSLRSDDTAVYYCARANWLDYWGQ
GTTVTVSS
>Heavy Chain of Emibetuzumab IgG histidine scanning variant #22 (SEQ ID NO: 175)
QVQLVQSGAEVKKPGASVKVSCKASGYTFTDYYMHWVRQAPGQGLEWMGRVNP
NRRGTTYHQKFEGRVTMTTDTSTSTAYMELRSLRSDDTAVYYCARANWLDYWGQ
GTTVTVSS
>Heavy Chain of Emibetuzumab IgG histidine scanning variant #23 (SEQ ID NO: 176)
QVQLVQSGAEVKKPGASVKVSCKASGYTFTDYYMHWVRQAPGQGLEWMGRVNP
NRRGTTYNHKFEGRVTMTTDTSTSTAYMELRSLRSDDTAVYYCARANWLDYWGQ
GTTVTVSS
>Heavy Chain of Emibetuzumab IgG histidine scanning variant #24 (SEQ ID NO: 177)
QVQLVQSGAEVKKPGASVKVSCKASGYTFTDYYMHWVRQAPGQGLEWMGRVNP
NRRGTTYNQHFEGRVTMTTDTSTSTAYMELRSLRSDDTAVYYCARANWLDYWGQ
GTTVTVSS
>Heavy Chain of Emibetuzumab IgG histidine scanning variant #25 (SEQ ID NO: 178)
QVQLVQSGAEVKKPGASVKVSCKASGYTFTDYYMHWVRQAPGQGLEWMGRVNP
NRRGTTYNQKHEGRVTMTTDTSTSTAYMELRSLRSDDTAVYYCARANWLDYWGQ
GTTVTVSS
>Heavy Chain of Emibetuzumab IgG histidine scanning variant #26 (SEQ ID NO: 179)
QVQLVQSGAEVKKPGASVKVSCKASGYTFTDYYMHWVRQAPGQGLEWMGRVNP
NRRGTTYNQKFHGRVTMTTDTSTSTAYMELRSLRSDDTAVYYCARANWLDYWGQ
GTTVTVSS
>Heavy Chain of Emibetuzumab IgG histidine scanning variant #27 (SEQ ID NO: 180)
QVQLVQSGAEVKKPGASVKVSCKASGYTFTDYYMHWVRQAPGQGLEWMGRVNP
NRRGTTYNQKFEHRVTMTTDTSTSTAYMELRSLRSDDTAVYYCARANWLDYWGQ
GTTVTVSS
>Heavy Chain of Emibetuzumab IgG histidine scanning variant #28 (SEQ ID NO: 181)
QVQLVQSGAEVKKPGASVKVSCKASGYTFTDYYMHWVRQAPGQGLEWMGRVNP
NRRGTTYNQKFEGRVTMTTDTSTSTAYMELRSLRSDDTAVYYCHRANWLDYWGQ
GTTVTVSS
>Heavy Chain of Emibetuzumab IgG histidine scanning variant #29 (SEQ ID NO: 182)
QVQLVQSGAEVKKPGASVKVSCKASGYTFTDYYMHWVRQAPGQGLEWMGRVNP
NRRGTTYNQKFEGRVTMTTDT STSTAYMELRSLRSDDTAVYYCAHANWLDYWGQ
GTTVTVSS
>Heavy Chain of Emibetuzumab IgG histidine scanning variant #30 (SEQ ID NO: 183)
QVQLVQSGAEVKKPGASVKVSCKASGYTFTDYYMHWVRQAPGQGLEWMGRVNP
NRRGTTYNQKFEGRVTMTTDTSTSTAYMELRSLRSDDTAVYYCARHNWLDYWGQ
GTTVTVSS
>Heavy Chain of Emibetuzumab IgG histidine scanning variant #31 (SEQ ID NO: 184)
QVQLVQSGAEVKKPGASVKVSCKASGYTFTDYYMHWVRQAPGQGLEWMGRVNP
NRRGTTYNQKFEGRVTMTTDTSTSTAYMELRSLRSDDTAVYYCARAHWLDYWGQ
GTTVTVSS
>Heavy Chain of Emibetuzumab IgG histidine scanning variant #32 (SEQ ID NO: 185)
QVQLVQSGAEVKKPGASVKVSCKASGYTFTDYYMHWVRQAPGQGLEWMGRVNP
NRRGTTYNQKFEGRVTMTTDTSTSTAYMELRSLRSDDTAVYYCARANHLDYWGQG
TTVTVSS
>Heavy Chain of Emibetuzumab IgG histidine scanning variant #33 (SEQ ID NO: 186)
QVQLVQSGAEVKKPGASVKVSCKASGYTFTDYYMHWVRQAPGQGLEWMGRVNP
NRRGTTYNQKFEGRVTMTTDTSTSTAYMELRSLRSDDTAVYYCARANWHDYWGQ
GTTVTVSS
>Heavy Chain of Emibetuzumab IgG histidine scanning variant #34 (SEQ ID NO: 187)
QVQLVQSGAEVKKPGASVKVSCKASGYTFTDYYMHWVRQAPGQGLEWMGRVNP
NRRGTTYNQKFEGRVTMTTDTSTSTAYMELRSLRSDDTAVYYCARANWLHYWGQ
GTTVTVSS
>Heavy Chain of Emibetuzumab IgG histidine scanning variant #35 (SEQ ID NO: 188)
QVQLVQSGAEVKKPGASVKVSCKASGYTFTDYYMHWVRQAPGQGLEWMGRVNP
NRRGTTYNQKFEGRVTMTTDTSTSTAYMELRSLRSDDTAVYYCARANWLDHWGQ
GTTVTVSS
>Light Chain of Emibetuzumab IgG histidine scanning variant #1 (SEQ ID NO: 189)
DIQMTQSPSSLSASVGDRVTITCHVSSSVSSIYLHWYQQKPGKAPKLLIYSTSNLASG
VPSRFSGSGSGTDFTLTISSLQPEDFATYYCQVYSGYPLTFGGGTKVEIK
>Light Chain of Emibetuzumab IgG histidine scanning variant #2 (SEQ ID NO: 190)
DIQMTQSPSSLSASVGDRVTITCSHSSSVSSIYLHWYQQKPGKAPKLLIYSTSNLASGV
PSRFSGSGSGTDFTLTISSLQPEDFATYYCQVYSGYPLTFGGGTKVEIK
>Light Chain of Emibetuzumab IgG histidine scanning variant #3 (SEQ ID NO: 191)
DIQMTQSPSSLSASVGDRVTITCSVHSSVSSIYLHWYQQKPGKAPKLLIYSTSNLASG
VPSRFSGSGSGTDFTLTISSLQPEDFATYYCQVYSGYPLTFGGGTKVEIK
>Light Chain of Emibetuzumab IgG histidine scanning variant #4 (SEQ ID NO: 192)
DIQMTQSPSSLSASVGDRVTITCSVSHSVSSIYLHWYQQKPGKAPKLLIYSTSNLASG
VPSRFSGSGSGTDFTLTISSLQPEDFATYYCQVYSGYPLTFGGGTKVEIK
>Light Chain of Emibetuzumab IgG histidine scanning variant #5 (SEQ ID NO: 193)
DIQMTQSPSSLSASVGDRVTITCSVSSHVSSIYLHWYQQKPGKAPKLLIYSTSNLASG
VPSRFSGSGSGTDFTLTISSLQPEDFATYYCQVYSGYPLTFGGGTKVEIK
>Light Chain of Emibetuzumab IgG histidine scanning variant #6 (SEQ ID NO: 194)
DIQMTQSPSSLSASVGDRVTITCSVSSSHSSIYLHWYQQKPGKAPKLLIYSTSNLASGV
PSRFSGSGSGTDFTLTISSLQPEDFATYYCQVYSGYPLTFGGGTKVEIK
>Light Chain of Emibetuzumab IgG histidine scanning variant #7 (SEQ ID NO: 195)
DIQMTQSPSSLSASVGDRVTITCSVSSSVHSIYLHWYQQKPGKAPKLLIYSTSNLASG
VPSRFSGSGSGTDFTLTISSLQPEDFATYYCQVYSGYPLTFGGGTKVEIK
>Light Chain of Emibetuzumab IgG histidine scanning variant #8 (SEQ ID NO: 196)
DIQMTQSPSSLSASVGDRVTITCSVSSSVSHIYLHWYQQKPGKAPKLLIYSTSNLASG
VPSRFSGSGSGTDFTLTISSLQPEDFATYYCQVYSGYPLTFGGGTKVEIK
>Light Chain of Emibetuzumab IgG histidine scanning variant #9 (SEQ ID NO: 197)
DIQMTQSPSSLSASVGDRVTITCSVSSSVSSHYLHWYQQKPGKAPKLLIYSTSNLASG
VPSRFSGSGSGTDFTLTISSLQPEDFATYYCQVYSGYPLTFGGGTKVEIK
>Light Chain of Emibetuzumab IgG histidine scanning variant #10 (SEQ ID NO: 198)
DIQMTQSPSSLSASVGDRVTITCSVSSSVSSIHLHWYQQKPGKAPKLLIYSTSNLASGV
PSRFSGSGSGTDFTLTISSLQPEDFATYYCQVYSGYPLTFGGGTKVEIK
>Light Chain of Emibetuzumab IgG histidine scanning variant #11 (SEQ ID NO: 199)
DIQMTQSPSSLSASVGDRVTITCSVSSSVSSIYHHWYQQKPGKAPKWYSTSNLASG
VPSRFSGSGSGTDFTLTISSLQPEDFATYYCQVYSGYPLTFGGGTKVEIK
>Light Chain of Emibetuzumab IgG histidine scanning variant #12 (SEQ ID NO: 200)
DIQMTQSPSSLSASVGDRVTITCSVSSSVSSIYLAWYQQKPGKAPKLLIYSTSNLASGV
PSRFSGSGSGTDFTLTISSLQPEDFATYYCQVYSGYPLTFGGGTKVEIK
>Light Chain of Emibetuzumab IgG histidine scanning variant #13 (SEQ ID NO: 201)
DIQMTQSPSSLSASVGDRVTITCSVSSSVSSIYLHWYQQKPGKAPKLLIYHTSNLASG
VPSRFSGSGSGTDFTLTISSLQPEDFATYYCQVYSGYPLTFGGGTKVEIK
>Light Chain of Emibetuzumab IgG histidine scanning variant #14 (SEQ ID NO: 202)
DIQMTQSPSSLSASVGDRVTITCSVSSSVSSIYLHWYQQKPGKAPKLLIYSHSNLASG
VPSRFSGSGSGTDFTLTISSLQPEDFATYYCQVYSGYPLTFGGGTKVEIK
>Light Chain of Emibetuzumab IgG histidine scanning variant #15 (SEQ ID NO: 203)
DIQMTQSPSSLSASVGDRVTITCSVSSSVSSIYLHWYQQKPGKAPKLLIYSTHNLASG
VPSRFSGSGSGTDFTLTISSLQPEDFATYYCQVYSGYPLTFGGGTKVEIK
>Light Chain of Emibetuzumab IgG histidine scanning variant #16 (SEQ ID NO: 204)
DIQMTQSPSSLSASVGDRVTITCSVSSSVSSIYLHWYQQKPGKAPKLLIYSTSHLASGV
PSRFSGSGSGTDFTLTISSLQPEDFATYYCQVYSGYPLTFGGGTKVEIK
>Light Chain of Emibetuzumab IgG histidine scanning variant #17 (SEQ ID NO: 205)
DIQMTQSPSSLSASVGDRVTITCSVSSSVSSIYLHWYQQKPGKAPKLLIYSTSNHASG
VPSRFSGSGSGTDFTLTISSLQPEDFATYYCQVYSGYPLTFGGGTKVEIK
>Light Chain of Emibetuzumab IgG histidine scanning variant #18 (SEQ ID NO: 206)
DIQMTQSPSSLSASVGDRVTITCSVSSSVSSIYLHWYQQKPGKAPKLLIYSTSNLHSGV
PSRFSGSGSGTDFTLTISSLQPEDFATYYCQVYSGYPLTFGGGTKVEIK
>Light Chain of Emibetuzumab IgG histidine scanning variant #19 (SEQ ID NO: 207)
DIQMTQSPSSLSASVGDRVTITCSVSSSVSSIYLHWYQQKPGKAPKLLIYSTSNLAHG
VPSRFSGSGSGTDFTLTISSLQPEDFATYYCQVYSGYPLTFGGGTKVEIK
>Light Chain of Emibetuzumab IgG histidine scanning variant #20 (SEQ ID NO: 208)
DIQMTQSPSSLSASVGDRVTITCSVSSSVSSIYLHWYQQKPGKAPKLLIYSTSNLASGV
PSRFSGSGSGTDFTLTISSLQPEDFATYYCHVYSGYPLTFGGGTKVEIK
>Light Chain of Emibetuzumab IgG histidine scanning variant #21 (SEQ ID NO: 209)
DIQMTQSPSSLSASVGDRVTITCSVSSSVSSIYLHWYQQKPGKAPKLLIYSTSNLASGV
PSRFSGSGSGTDFTLTISSLQPEDFATYYCQHYSGYPLTFGGGTKVEIK
>Light Chain of Emibetuzumab IgG histidine scanning variant #22 (SEQ ID NO: 210)
DIQMTQSPSSLSASVGDRVTITCSVSSSVSSIYLHWYQQKPGKAPKLLIYSTSNLASGV
PSRFSGSGSGTDFTLTISSLQPEDFATYYCQVHSGYPLTFGGGTKVEIK
>Light Chain of Emibetuzumab IgG histidine scanning variant #23 (SEQ ID NO: 211)
DIQMTQSPSSLSASVGDRVTITCSVSSSVSSIYLHWYQQKPGKAPKLLIYSTSNLASGV
PSRFSGSGSGTDFTLTISSLQPEDFATYYCQVYHGYPLTFGGGTKVEIK
>Light Chain of Emibetuzumab IgG histidine scanning variant #24 (SEQ ID NO: 212)
DIQMTQSPSSLSASVGDRVTITCSVSSSVSSIYLHWYQQKPGKAPKLLIYSTSNLASGV
PSRFSGSGSGTDFTLTISSLQPEDFATYYCQVYSHYPLTFGGGTKVEIK
>Light Chain of Emibetuzumab IgG histidine scanning variant #25 (SEQ ID NO: 213)
DIQMTQSPSSLSASVGDRVTITCSVSSSVSSIYLHWYQQKPGKAPKLLIYSTSNLASGV
PSRFSGSGSGTDFTLTISSLQPEDFATYYCQVYSGHPLTFGGGTKVEIK
>Light Chain of Emibetuzumab IgG histidine scanning variant #26 (SEQ ID NO: 214)
DIQMTQSPSSLSASVGDRVTITCSVSSSVSSIYLHWYQQKPGKAPKLLIYSTSNLASGV
PSRFSGSGSGTDFTLTISSLQPEDFATYYCQVYSGYHLTFGGGTKVEIK
>Light Chain of Emibetuzumab IgG histidine scanning variant #27 (SEQ ID NO: 215)
DIQMTQSPSSLSASVGDRVTITCSVSSSVSSIYLHWYQQKPGKAPKLLIYSTSNLASGV
PSRFSGSGSGTDFTLTISSLQPEDFATYYCQVYSGYPHTFGGGTKVEIK
>Light Chain of Emibetuzumab IgG histidine scanning variant #28 (SEQ ID NO: 216)
DIQMTQSPSSLSASVGDRVTITCSVSSSVSSIYLHWYQQKPGKAPKLLIYSTSNLASGV
PSRFSGSGSGTDFTLTISSLQPEDFATYYCQVYSGYPLHFGGGTKVEIK
>Heavy Chain Combinations of Emibetuzumab IgG histidine scanning variant #1 (SEQ ID
NO: 217)
QVQLVQSGAEVKKPGASVKVSCKASGYTFTHYYMHWVRQAPGQGLEWMGRVHP
NRRGTTYNQKFEGRVTMTTDTSTSTAYMELRSLRSDDTAVYYCARANWLDYWGQ
GTTVTVSS
>Heavy Chain Combinations of Emibetuzumab IgG histidine scanning variant #2 (SEQ ID
NO: 218)
QVQLVQSGAEVKKPGASVKVSCKASGYTFTHYYMHWVRQAPGQGLEWMGRVNP
HRRGTTYNQKFEGRVTMTTDTSTSTAYMELRSLRSDDTAVYYCARANWLDYWGQ
GTTVTVSS
>Heavy Chain Combinations of Emibetuzumab IgG histidine scanning variant #3 (SEQ ID
NO: 219)
QVQLVQSGAEVKKPGASVKVSCKASGYTFTHYYMHWVRQAPGQGLEWMGRVNP
NRRHTTYNQKFEGRVTMTTDTSTSTAYMELRSLRSDDTAVYYCARANWLDYWGQ
GTTVTVSS
>Heavy Chain Combinations of Emibetuzumab IgG histidine scanning variant #4 (SEQ ID
NO: 220)
QVQLVQSGAEVKKPGASVKVSCKASGYTFTHYYMHWVRQAPGQGLEWMGRVNP
NRRGTTYNQKFEGRVTMTTDTSTSTAYMELRSLRSDDTAVYYCARAHWLDYWGQ
GTTVTVSS
>Heavy Chain Combinations of Emibetuzumab IgG histidine scanning variant #5 (SEQ ID
NO: 221)
QVQLVQSGAEVKKPGASVKVSCKASGYTFTDYYMHWVRQAPGQGLEWMGRVHP
HRRGTTYNQKFEGRVTMTTDTSTSTAYMELRSLRSDDTAVYYCARANWLDYWGQ
GTTVTVSS
>Heavy Chain Combinations of Emibetuzumab IgG histidine scanning variant #6 (SEQ ID
NO: 222)
QVQLVQSGAEVKKPGASVKVSCKASGYTFTDYYMHWVRQAPGQGLEWMGRVHP
NRRHTTYNQKFEGRVTMTTDTSTSTAYMELRSLRSDDTAVYYCARANWLDYWGQ
GTTVTVSS
>Heavy Chain Combinations of Emibetuzumab IgG histidine scanning variant #7 (SEQ ID
NO: 223)
QVQLVQSGAEVKKPGASVKVSCKASGYTFTDYYMHWVRQAPGQGLEWMGRVHP
NRRGTTYNQKFEGRVTMTTDTSTSTAYMELRSLRSDDTAVYYCARAHWLDYWGQ
GTTVTVSS
>Heavy Chain Combinations of Emibetuzumab IgG histidine scanning variant #8 (SEQ ID
NO: 224)
QVQLVQSGAEVKKPGASVKVSCKASGYTFTDYYMHWVRQAPGQGLEWMGRVNP
HRRHTTYNQKFEGRVTMTTDTSTSTAYMELRSLRSDDTAVYYCARANWLDYWGQ
GTTVTVSS
>Heavy Chain Combinations of Emibetuzumab IgG histidine scanning variant #9 (SEQ ID
NO: 225)
QVQLVQSGAEVKKPGASVKVSCKASGYTFTDYYMHWVRQAPGQGLEWMGRVNP
HRRGTTYNQKFEGRVTMTTDTSTSTAYMELRSLRSDDTAVYYCARAHWLDYWGQ
GTTVTVSS
>Heavy Chain Combinations of Emibetuzumab IgG histidine scanning variant #10 (SEQ ID
NO: 226)
QVQLVQSGAEVKKPGASVKVSCKASGYTFTDYYMHWVRQAPGQGLEWMGRVNP
NRRHTTYNQKFEGRVTMTTDTSTSTAYMELRSLRSDDTAVYYCARAHWLDYWGQ
GTTVTVSS
>Heavy Chain Combinations of Emibetuzumab IgG histidine scanning variant #11 (SEQ ID
NO: 227)
QVQLVQSGAEVKKPGASVKVSCKASGYTFTHYYMHWVRQAPGQGLEWMGRVHP
HRRGTTYNQKFEGRVTMTTDTSTSTAYMELRSLRSDDTAVYYCARANWLDYWGQ
GTTVTVSS
>Heavy Chain Combinations of Emibetuzumab IgG histidine scanning variant #12 (SEQ ID
NO: 228)
QVQLVQSGAEVKKPGASVKVSCKASGYTFTHYYMHWVRQAPGQGLEWMGRVHP
NRRHTTYNQKFEGRVTMTTDTSTSTAYMELRSLRSDDTAVYYCARANWLDYWGQ
GTTVTVSS
>Heavy Chain Combinations of Emibetuzumab IgG histidine scanning variant #13 (SEQ ID
NO: 229)
QVQLVQSGAEVKKPGASVKVSCKASGYTFTHYYMHWVRQAPGQGLEWMGRVHP
NRRGTTYNQKFEGRVTMTTDTSTSTAYMELRSLRSDDTAVYYCARAHWLDYWGQ
GTTVTVSS
>Heavy Chain Combinations of Emibetuzumab IgG histidine scanning variant #14 (SEQ ID
NO: 230)
QVQLVQSGAEVKKPGASVKVSCKASGYTFTHYYMHWVRQAPGQGLEWMGRVNP
HRRHTTYNQKFEGRVTMTTDTSTSTAYMELRSLRSDDTAVYYCARANWLDYWGQ
GTTVTVSS
>Heavy Chain Combinations of Emibetuzumab IgG histidine scanning variant #15 (SEQ ID
NO: 231)
QVQLVQSGAEVKKPGASVKVSCKASGYTFTHYYMHWVRQAPGQGLEWMGRVNP
HRRGTTYNQKFEGRVTMTTDTSTSTAYMELRSLRSDDTAVYYCARAHWLDYWGQ
GTTVTVSS
>Heavy Chain Combinations of Emibetuzumab IgG histidine scanning variant #16 (SEQ ID
NO: 232)
QVQLVQSGAEVKKPGASVKVSCKASGYTFTHYYMHWVRQAPGQGLEWMGRVNP
NRRHTTYNQKFEGRVTMTTDTSTSTAYMELRSLRSDDTAVYYCARAHWLDYWGQ
GTTVTVSS
>Heavy Chain Combinations of Emibetuzumab IgG histidine scanning variant #17 (SEQ ID
NO: 233)
QVQLVQSGAEVKKPGASVKVSCKASGYTFTDYYMHWVRQAPGQGLEWMGRVHP
HRRHTTYNQKFEGRVTMTTDTSTSTAYMELRSLRSDDTAVYYCARANWLDYWGQ
GTTVTVSS
>Heavy Chain Combinations of Emibetuzumab IgG histidine scanning variant #18 (SEQ ID
NO: 234)
QVQLVQSGAEVKKPGASVKVSCKASGYTFTDYYMHWVRQAPGQGLEWMGRVHP
HRRGTTYNQKFEGRVTMTTDTSTSTAYMELRSLRSDDTAVYYCARAHWLDYWGQ
GTTVTVSS
>Heavy Chain Combinations of Emibetuzumab IgG histidine scanning variant #19 (SEQ ID
NO: 235)
QVQLVQSGAEVKKPGASVKVSCKASGYTFTDYYMHWVRQAPGQGLEWMGRVHP
NRRHTTYNQKFEGRVTMTTDTSTSTAYMELRSLRSDDTAVYYCARAHWLDYWGQ
GTTVTVSS
>Heavy Chain Combinations of Emibetuzumab IgG histidine scanning variant #20 (SEQ ID
NO: 236)
QVQLVQSGAEVKKPGASVKVSCKASGYTFTDYYMHWVRQAPGQGLEWMGRVNP
HRRHTTYNQKFEGRVTMTTDTSTSTAYMELRSLRSDDTAVYYCARAHWLDYWGQ
GTTVTVSS
>Heavy Chain Combinations of Emibetuzumab IgG histidine scanning variant #21 (SEQ ID
NO: 237)
QVQLVQSGAEVKKPGASVKVSCKASGYTFTHYYMHWVRQAPGQGLEWMGRVNH
NRRGTTYNQKFEGRVTMTTDTSTSTAYMELRSLRSDDTAVYYCARANWLDYWGQ
GTTVTVSS
>Heavy Chain Combinations of Emibetuzumab IgG histidine scanning variant #22 (SEQ ID
NO: 238)
QVQLVQSGAEVKKPGASVKVSCKASGYTFTDYYMHWVRQAPGQGLEWMGRVHH
NRRGTTYNQKFEGRVTMTTDTSTSTAYMELRSLRSDDTAVYYCARANWLDYWGQ
GTTVTVSS
>Heavy Chain Combinations of Emibetuzumab IgG histidine scanning variant #23 (SEQ ID
NO: 239)
QVQLVQSGAEVKKPGASVKVSCKASGYTFTHYYMHWVRQAPGQGLEWMGRVNP
NRRGTTYNQKFEGRVTMTTDTSTSTAYMELRSLRSDDTAVYYCARHNWLDYWGQ
GTTVTVSS
>Heavy Chain Combinations of Emibetuzumab IgG histidine scanning variant #24 (SEQ ID
NO: 240)
QVQLVQSGAEVKKPGASVKVSCKASGYTFTDYYMHWVRQAPGQGLEWMGRVHP
NRRGTTYNQKFEGRVTMTTDTSTSTAYMELRSLRSDDTAVYYCARHNWLDYWGQ
GTTVTVSS
>Heavy Chain Combinations of Emibetuzumab IgG histidine scanning variant #25 (SEQ ID
NO: 241)
QVQLVQSGAEVKKPGASVKVSCKASGYTFTDYYMHWVRQAPGQGLEWMGRVNH
NRRGTTYNQKFEGRVTMTTDTSTSTAYMELRSLRSDDTAVYYCARHNWLDYWGQ
GTTVTVSS
>Heavy Chain Combinations of Emibetuzumab IgG histidine scanning variant #26 (SEQ ID
NO: 242)
QVQLVQSGAEVKKPGASVKVSCKASGYTFTHYYMHWVRQAPGQGLEWMGRVNH
NRRGTTYNQKFEGRVTMTTDTSTSTAYMELRSLRSDDTAVYYCARHNWLDYWGQ
GTTVTVSS
>Heavy Chain Combinations of Emibetuzumab IgG histidine scanning variant #27 (SEQ ID
NO: 243)
QVQLVQSGAEVKKPGASVKVSCKASGYTFTDYYMHWVRQAPGQGLEWMGRVHH
NRRGTTYNQKFEGRVTMTTDTSTSTAYMELRSLRSDDTAVYYCARHNWLDYWGQ
GTTVTVSS
>Heavy Chain Combinations of Emibetuzumab IgG histidine scanning variant #28 (SEQ ID
NO: 244)
QVQLVQSGAEVKKPGASVKVSCKASGYTFTHYYMHWVRQAPGQGLEWMGRVHH
NRRGTTYNQKFEGRVTMTTDTSTSTAYMELRSLRSDDTAVYYCARANWLDYWGQ
GTTVTVSS
>Heavy Chain Combinations of Emibetuzumab IgG histidine scanning variant #29 (SEQ ID
NO: 245)
QVQLVQSGAEVKKPGASVKVSCKASGYTFTHYYMHWVRQAPGQGLEWMGRVNH
HRRGTTYNQKFEGRVTMTTDTSTSTAYMELRSLRSDDTAVYYCARANWLDYWGQ
GTTVTVSS
>Heavy Chain Combinations of Emibetuzumab IgG histidine scanning variant #30 (SEQ ID
NO: 246)
QVQLVQSGAEVKKPGASVKVSCKASGYTFTHYYMHWVRQAPGQGLEWMGRVNH
NRRHTTYNQKFEGRVTMTTDTSTSTAYMELRSLRSDDTAVYYCARANWLDYWGQ
GTTVTVSS
>Heavy Chain Combinations of Emibetuzumab IgG histidine scanning variant #31 (SEQ ID
NO: 247)
QVQLVQSGAEVKKPGASVKVSCKASGYTFTHYYMHWVRQAPGQGLEWMGRVNH
NRRGTTYNQKFEGRVTMTTDTSTSTAYMELRSLRSDDTAVYYCARAHWLDYWGQ
GTTVTVSS
>Heavy Chain Combinations of Emibetuzumab IgG histidine scanning variant #32 (SEQ ID
NO: 248)
QVQLVQSGAEVKKPGASVKVSCKASGYTFTDYYMHWVRQAPGQGLEWMGRVHH
HRRGTTYNQKFEGRVTMTTDTSTSTAYMELRSLRSDDTAVYYCARANWLDYWGQ
GTTVTVSS
>Heavy Chain Combinations of Emibetuzumab IgG histidine scanning variant #33 (SEQ ID
NO: 249)
QVQLVQSGAEVKKPGASVKVSCKASGYTFTDYYMHWVRQAPGQGLEWMGRVHH
NRRHTTYNQKFEGRVTMTTDTSTSTAYMELRSLRSDDTAVYYCARANWLDYWGQ
GTTVTVSS
>Heavy Chain Combinations of Emibetuzumab IgG histidine scanning variant #34 (SEQ ID
NO: 250)
QVQLVQSGAEVKKPGASVKVSCKASGYTFTDYYMHWVRQAPGQGLEWMGRVHH
NRRGTTYNQKFEGRVTMTTDTSTSTAYMELRSLRSDDTAVYYCARAHWLDYWGQ
GTTVTVSS
>Heavy Chain Combinations of Emibetuzumab IgG histidine scanning variant #35 (SEQ ID
NO: 251)
QVQLVQSGAEVKKPGASVKVSCKASGYTFTDYYMHWVRQAPGQGLEWMGRVNH
HRRHTTYNQKFEGRVTMTTDTSTSTAYMELRSLRSDDTAVYYCARANWLDYWGQ
GTTVTVSS
>Heavy Chain Combinations of Emibetuzumab IgG histidine scanning variant #36 (SEQ ID
NO: 252)
QVQLVQSGAEVKKPGASVKVSCKASGYTFTDYYMHWVRQAPGQGLEWMGRVNH
HRRGTTYNQKFEGRVTMTTDTSTSTAYMELRSLRSDDTAVYYCARAHWLDYWGQ
GTTVTVSS
>Heavy Chain Combinations of Emibetuzumab IgG histidine scanning variant #37 (SEQ ID
NO: 253)
QVQLVQSGAEVKKPGASVKVSCKASGYTFTDYYMHWVRQAPGQGLEWMGRVNH
NRRHTTYNQKFEGRVTMTTDTSTSTAYMELRSLRSDDTAVYYCARAHWLDYWGQ
GTTVTVSS
>Heavy Chain Combinations of Emibetuzumab IgG histidine scanning variant #38 (SEQ ID
NO: 254)
QVQLVQSGAEVKKPGASVKVSCKASGYTFTHYYMHWVRQAPGQGLEWMGRVHH
HRRGTTYNQKFEGRVTMTTDTSTSTAYMELRSLRSDDTAVYYCARANWLDYWGQ
GTTVTVSS
>Heavy Chain Combinations of Emibetuzumab IgG histidine scanning variant #39 (SEQ ID
NO: 255)
QVQLVQSGAEVKKPGASVKVSCKASGYTFTHYYMHWVRQAPGQGLEWMGRVHH
NRRHTTYNQKFEGRVTMTTDTSTSTAYMELRSLRSDDTAVYYCARANWLDYWGQ
GTTVTVSS
>Heavy Chain Combinations of Emibetuzumab IgG histidine scanning variant #40 (SEQ ID
NO: 256)
QVQLVQSGAEVKKPGASVKVSCKASGYTFTHYYMHWVRQAPGQGLEWMGRVHH
NRRGTTYNQKFEGRVTMTTDTSTSTAYMELRSLRSDDTAVYYCARAHWLDYWGQ
GTTVTVSS
>Heavy Chain Combinations of Emibetuzumab IgG histidine scanning variant #41 (SEQ ID
NO: 257)
QVQLVQSGAEVKKPGASVKVSCKASGYTFTHYYMHWVRQAPGQGLEWMGRVNH
HRRHTTYNQKFEGRVTMTTDTSTSTAYMELRSLRSDDTAVYYCARANWLDYWGQ
GTTVTVSS
>Heavy Chain Combinations of Emibetuzumab IgG histidine scanning variant #42 (SEQ ID
NO: 258)
QVQLVQSGAEVKKPGASVKVSCKASGYTFTHYYMHWVRQAPGQGLEWMGRVNH
HRRGTTYNQKFEGRVTMTTDTSTSTAYMELRSLRSDDTAVYYCARAHWLDYWGQ
GTTVTVSS
>Heavy Chain Combinations of Emibetuzumab IgG histidine scanning variant #43 (SEQ ID
NO: 259)
QVQLVQSGAEVKKPGASVKVSCKASGYTFTHYYMHWVRQAPGQGLEWMGRVNH
NRRHTTYNQKFEGRVTMTTDTSTSTAYMELRSLRSDDTAVYYCARAHWLDYWGQ
GTTVTVSS
>Heavy Chain Combinations of Emibetuzumab IgG histidine scanning variant #44 (SEQ ID
NO: 260)
QVQLVQSGAEVKKPGASVKVSCKASGYTFTDYYMHWVRQAPGQGLEWMGRVHH
HRRHTTYNQKFEGRVTMTTDTSTSTAYMELRSLRSDDTAVYYCARANWLDYWGQ
GTTVTVSS
>Heavy Chain Combinations of Emibetuzumab IgG histidine scanning variant #45 (SEQ ID
NO: 261)
QVQLVQSGAEVKKPGASVKVSCKASGYTFTDYYMHWVRQAPGQGLEWMGRVHH
HRRGTTYNQKFEGRVTMTTDTSTSTAYMELRSLRSDDTAVYYCARAHWLDYWGQ
GTTVTVSS
>Heavy Chain Combinations of Emibetuzumab IgG histidine scanning variant #46 (SEQ ID
NO: 262)
QVQLVQSGAEVKKPGASVKVSCKASGYTFTDYYMHWVRQAPGQGLEWMGRVHH
NRRHTTYNQKFEGRVTMTTDTSTSTAYMELRSLRSDDTAVYYCARAHWLDYWGQ
GTTVTVSS
>Heavy Chain Combinations of Emibetuzumab IgG histidine scanning variant #47 (SEQ ID
NO: 263)
QVQLVQSGAEVKKPGASVKVSCKASGYTFTDYYMHWVRQAPGQGLEWMGRVNH
HRRHTTYNQKFEGRVTMTTDTSTSTAYMELRSLRSDDTAVYYCARAHWLDYWGQ
GTTVTVSS
>Heavy Chain Combinations of Emibetuzumab IgG histidine scanning variant #48 (SEQ ID
NO: 264)
QVQLVQSGAEVKKPGASVKVSCKASGYTFTHYYMHWVRQAPGQGLEWMGRVHP
NRRGTTYNQKFEGRVTMTTDTSTSTAYMELRSLRSDDTAVYYCARHNWLDYWGQ
GTTVTVSS
>Heavy Chain Combinations of Emibetuzumab IgG histidine scanning variant #49 (SEQ ID
NO: 265)
QVQLVQSGAEVKKPGASVKVSCKASGYTFTHYYMHWVRQAPGQGLEWMGRVNP
HRRGTTYNQKFEGRVTMTTDTSTSTAYMELRSLRSDDTAVYYCARHNWLDYWGQ
GTTVTVSS
>Heavy Chain Combinations of Emibetuzumab IgG histidine scanning variant #50 (SEQ ID
NO: 266)
QVQLVQSGAEVKKPGASVKVSCKASGYTFTHYYMHWVRQAPGQGLEWMGRVNP
NRRHTTYNQKFEGRVTMTTDTSTSTAYMELRSLRSDDTAVYYCARHNWLDYWGQ
GTTVTVSS
>Heavy Chain Combinations of Emibetuzumab IgG histidine scanning variant #51 (SEQ ID
NO: 267)
QVQLVQSGAEVKKPGASVKVSCKASGYTFTHYYMHWVRQAPGQGLEWMGRVNP
NRRGTTYNQKFEGRVTMTTDTSTSTAYMELRSLRSDDTAVYYCARHHWLDYWGQ
GTTVTVSS
>Heavy Chain Combinations of Emibetuzumab IgG histidine scanning variant #52 (SEQ ID
NO: 268)
QVQLVQSGAEVKKPGASVKVSCKASGYTFTDYYMHWVRQAPGQGLEWMGRVHP
HRRGTTYNQKFEGRVTMTTDTSTSTAYMELRSLRSDDTAVYYCARHNWLDYWGQ
GTTVTVSS
>Heavy Chain Combinations of Emibetuzumab IgG histidine scanning variant #53 (SEQ ID
NO: 269)
QVQLVQSGAEVKKPGASVKVSCKASGYTFTDYYMHWVRQAPGQGLEWMGRVHP
NRRHTTYNQKFEGRVTMTTDTSTSTAYMELRSLRSDDTAVYYCARHNWLDYWGQ
GTTVTVSS
>Heavy Chain Combinations of Emibetuzumab IgG histidine scanning variant #54 (SEQ ID
NO: 270)
QVQLVQSGAEVKKPGASVKVSCKASGYTFTDYYMHWVRQAPGQGLEWMGRVHP
NRRGTTYNQKFEGRVTMTTDTSTSTAYMELRSLRSDDTAVYYCARHHWLDYWGQ
GTTVTVSS
>Heavy Chain Combinations of Emibetuzumab IgG histidine scanning variant #55 (SEQ ID
NO: 271)
QVQLVQSGAEVKKPGASVKVSCKASGYTFTDYYMHWVRQAPGQGLEWMGRVNP
HRRHTTYNQKFEGRVTMTTDTSTSTAYMELRSLRSDDTAVYYCARHNWLDYWGQ
GTTVTVSS
>Heavy Chain Combinations of Emibetuzumab IgG histidine scanning variant #56 (SEQ ID
NO: 272)
QVQLVQSGAEVKKPGASVKVSCKASGYTFTDYYMHWVRQAPGQGLEWMGRVNP
HRRGTTYNQKFEGRVTMTTDTSTSTAYMELRSLRSDDTAVYYCARHHWLDYWGQ
GTTVTVSS
>Heavy Chain Combinations of Emibetuzumab IgG histidine scanning variant #57 (SEQ ID
NO: 273)
QVQLVQSGAEVKKPGASVKVSCKASGYTFTDYYMHWVRQAPGQGLEWMGRVNP
NRRHTTYNQKFEGRVTMTTDTSTSTAYMELRSLRSDDTAVYYCARHHWLDYWGQ
GTTVTVSS
>Heavy Chain Combinations of Emibetuzumab IgG histidine scanning variant #58 (SEQ ID
NO: 274)
QVQLVQSGAEVKKPGASVKVSCKASGYTFTHYYMHWVRQAPGQGLEWMGRVHP
HRRGTTYNQKFEGRVTMTTDTSTSTAYMELRSLRSDDTAVYYCARHNWLDYWGQ
GTTVTVSS
>Heavy Chain Combinations of Emibetuzumab IgG histidine scanning variant #59 (SEQ ID
NO: 275)
QVQLVQSGAEVKKPGASVKVSCKASGYTFTHYYMHWVRQAPGQGLEWMGRVHP
NRRHTTYNQKFEGRVTMTTDTSTSTAYMELRSLRSDDTAVYYCARHNWLDYWGQ
GTTVTVSS
>Heavy Chain Combinations of Emibetuzumab IgG histidine scanning variant #60 (SEQ ID
NO: 276)
QVQLVQSGAEVKKPGASVKVSCKASGYTFTHYYMHWVRQAPGQGLEWMGRVHP
NRRGTTYNQKFEGRVTMTTDTSTSTAYMELRSLRSDDTAVYYCARHHWLDYWGQ
GTTVTVSS
>Heavy Chain Combinations of Emibetuzumab IgG histidine scanning variant #61 (SEQ ID
NO: 277)
QVQLVQSGAEVKKPGASVKVSCKASGYTFTHYYMHWVRQAPGQGLEWMGRVNP
HRRHTTYNQKFEGRVTMTTDTSTSTAYMELRSLRSDDTAVYYCARHNWLDYWGQ
GTTVTVSS
>Heavy Chain Combinations of Emibetuzumab IgG histidine scanning variant #62 (SEQ ID
NO: 278)
QVQLVQSGAEVKKPGASVKVSCKASGYTFTHYYMHWVRQAPGQGLEWMGRVNP
HRRGTTYNQKFEGRVTMTTDTSTSTAYMELRSLRSDDTAVYYCARHHWLDYWGQ
GTTVTVSS
>Heavy Chain Combinations of Emibetuzumab IgG histidine scanning variant #63 (SEQ ID
NO: 279)
QVQLVQSGAEVKKPGASVKVSCKASGYTFTHYYMHWVRQAPGQGLEWMGRVNP
NRRHTTYNQKFEGRVTMTTDTSTSTAYMELRSLRSDDTAVYYCARHHWLDYWGQ
GTTVTVSS
>Heavy Chain Combinations of Emibetuzumab IgG histidine scanning variant #64 (SEQ ID
NO: 280)
QVQLVQSGAEVKKPGASVKVSCKASGYTFTDYYMHWVRQAPGQGLEWMGRVHP
HRRHTTYNQKFEGRVTMTTDTSTSTAYMELRSLRSDDTAVYYCARHNWLDYWGQ
GTTVTVSS
>Heavy Chain Combinations of Emibetuzumab IgG histidine scanning variant #65 (SEQ ID
NO: 281)
QVQLVQSGAEVKKPGASVKVSCKASGYTFTDYYMHWVRQAPGQGLEWMGRVHP
HRRGTTYNQKFEGRVTMTTDTSTSTAYMELRSLRSDDTAVYYCARHHWLDYWGQ
GTTVTVSS
>Heavy Chain Combinations of Emibetuzumab IgG histidine scanning variant #66 (SEQ ID
NO: 282)
QVQLVQSGAEVKKPGASVKVSCKASGYTFTDYYMHWVRQAPGQGLEWMGRVHP
NRRHTTYNQKFEGRVTMTTDTSTSTAYMELRSLRSDDTAVYYCARHHWLDYWGQ
GTTVTVSS
>Heavy Chain Combinations of Emibetuzumab IgG histidine scanning variant #67 (SEQ ID
NO: 283)
QVQLVQSGAEVKKPGASVKVSCKASGYTFTDYYMHWVRQAPGQGLEWMGRVNP
HRRHTTYNQKFEGRVTMTTDTSTSTAYMELRSLRSDDTAVYYCARHHWLDYWGQ
GTTVTVSS
>Light Chain Combinations of Emibetuzumab IgG histidine scanning variant #1 (SEQ ID
NO: 284)
DIQMTQSPSSLSASVGDRVTITCSVSSSVSSIHLHWYQQKPGKAPKLLIYHTSNLASG
VPSRFSGSGSGTDFTLTISSLQPEDFATYYCQVYSGYPLTFGGGTKVEIK
>Light Chain Combinations of Emibetuzumab IgG histidine scanning variant #2 (SEQ ID
NO: 285)
DIQMTQSPSSLSASVGDRVTITCSVSSSVSSIHLHWYQQKPGKAPKLLIYSTSNLASGV
PSRFSGSGSGTDFTLTISSLQPEDFATYYCQHYSGYPLTFGGGTKVEIK
>Light Chain Combinations of Emibetuzumab IgG histidine scanning variant #3 (SEQ ID
NO: 286)
DIQMTQSPSSLSASVGDRVTITCSVSSSVSSIHLHWYQQKPGKAPKLLIYSTSNLASGV
PSRFSGSGSGTDFTLTISSLQPEDFATYYCQVHSGYPLTFGGGTKVEIK
>Light Chain Combinations of Emibetuzumab IgG histidine scanning variant #4 (SEQ ID
NO: 287)
DIQMTQSPSSLSASVGDRVTITCSVSSSVSSIHLHWYQQKPGKAPKLLIYSTSNLASGV
PSRFSGSGSGTDFTLTISSLQPEDFATYYCQVYSGHPLTFGGGTKVEIK
>Light Chain Combinations of Emibetuzumab IgG histidine scanning variant #5 (SEQ ID
NO: 288)
DIQMTQSPSSLSASVGDRVTITCSVSSSVSSIYLHWYQQKPGKAPKLLIYHTSNLASG
VPSRFSGSGSGTDFTLTISSLQPEDFATYYCQHYSGYPLTFGGGTKVEIK
>Light Chain Combinations of Emibetuzumab IgG histidine scanning variant #6 (SEQ ID
NO: 289)
DIQMTQSPSSLSASVGDRVTITCSVSSSVSSIYLHWYQQKPGKAPKLLIYHTSNLASG
VPSRFSGSGSGTDFTLTISSLQPEDFATYYCQVHSGYPLTFGGGTKVEIK
>Light Chain Combinations of Emibetuzumab IgG histidine scanning variant #7 (SEQ ID
NO: 290)
DIQMTQSPSSLSASVGDRVTITCSVSSSVSSIYLHWYQQKPGKAPKLLIYHTSNLASG
VPSRFSGSGSGTDFTLTISSLQPEDFATYYCQVYSGHPLTFGGGTKVEIK
>Light Chain Combinations of Emibetuzumab IgG histidine scanning variant #8 (SEQ ID
NO: 291)
DIQMTQSPSSLSASVGDRVTITCSVSSSVSSIYLHWYQQKPGKAPKLLIYSTSNLASGV
PSRFSGSGSGTDFTLTISSLQPEDFATYYCQHHSGYPLTFGGGTKVEIK
>Light Chain Combinations of Emibetuzumab IgG histidine scanning variant #9 (SEQ ID
NO: 292)
DIQMTQSPSSLSASVGDRVTITCSVSSSVSSIYLHWYQQKPGKAPKLLIYSTSNLASGV
PSRFSGSGSGTDFTLTISSLQPEDFATYYCQHYSGHPLTFGGGTKVEIK
>Light Chain Combinations of Emibetuzumab IgG histidine scanning variant #10 (SEQ ID
NO: 293)
DIQMTQSPSSLSASVGDRVTITCSVSSSVSSIYLHWYQQKPGKAPKLLIYSTSNLASGV
PSRFSGSGSGTDFTLTISSLQPEDFATYYCQVHSGHPLTFGGGTKVEIK
>Light Chain Combinations of Emibetuzumab IgG histidine scanning variant #11 (SEQ ID
NO: 294)
DIQMTQSPSSLSASVGDRVTITCSVSSSVSSIHLHWYQQKPGKAPKLLIYHTSNLASG
VPSRFSGSGSGTDFTLTISSLQPEDFATYYCQHYSGYPLTFGGGTKVEIK
>Light Chain Combinations of Emibetuzumab IgG histidine scanning variant #12 (SEQ ID
NO: 295)
DIQMTQSPSSLSASVGDRVTITCSVSSSVSSIHLHWYQQKPGKAPKLLIYHTSNLASG
VPSRFSGSGSGTDFTLTISSLQPEDFATYYCQVHSGYPLTFGGGTKVEIK
>Light Chain Combinations of Emibetuzumab IgG histidine scanning variant #13 (SEQ ID
NO: 296)
DIQMTQSPSSLSASVGDRVTITCSVSSSVSSIHLHWYQQKPGKAPKLLIYHTSNLASG
VPSRFSGSGSGTDFTLTISSLQPEDFATYYCQVYSGHPLTFGGGTKVEIK
>Light Chain Combinations of Emibetuzumab IgG histidine scanning variant #14 (SEQ ID
NO: 297)
DIQMTQSPSSLSASVGDRVTITCSVSSSVSSIHLHWYQQKPGKAPKLLIYSTSNLASGV
PSRFSGSGSGTDFTLTISSLQPEDFATYYCQHHSGYPLTFGGGTKVEIK
>Light Chain Combinations of Emibetuzumab IgG histidine scanning variant #15 (SEQ ID
NO: 298)
DIQMTQSPSSLSASVGDRVTITCSVSSSVSSIHLHWYQQKPGKAPKLLIYSTSNLASGV
PSRFSGSGSGTDFTLTISSLQPEDFATYYCQHYSGHPLTFGGGTKVEIK
>Light Chain Combinations of Emibetuzumab IgG histidine scanning variant #16 (SEQ ID
NO: 299)
DIQMTQSPSSLSASVGDRVTITCSVSSSVSSIHLHWYQQKPGKAPKLLIYSTSNLASGV
PSRFSGSGSGTDFTLTISSLQPEDFATYYCQVHSGHPLTFGGGTKVEIK
>Light Chain Combinations of Emibetuzumab IgG histidine scanning variant #17 (SEQ ID
NO: 300)
DIQMTQSPSSLSASVGDRVTITCSVSSSVSSIYLHWYQQKPGKAPKLLIYHTSNLASG
VPSRFSGSGSGTDFTLTISSLQPEDFATYYCQHHSGYPLTFGGGTKVEIK
>Light Chain Combinations of Emibetuzumab IgG histidine scanning variant #18 (SEQ ID
NO: 301)
DIQMTQSPSSLSASVGDRVTITCSVSSSVSSIYLHWYQQKPGKAPKLLIYHTSNLASG
VPSRFSGSGSGTDFTLTISSLQPEDFATYYCQHYSGHPLTFGGGTKVEIK
>Light Chain Combinations of Emibetuzumab IgG histidine scanning variant #19 (SEQ ID
NO: 302)
DIQMTQSPSSLSASVGDRVTITCSVSSSVSSIYLHWYQQKPGKAPKLLIYHTSNLASG
VPSRFSGSGSGTDFTLTISSLQPEDFATYYCQVHSGHPLTFGGGTKVEIK
>Light Chain Combinations of Emibetuzumab IgG histidine scanning variant #20 (SEQ ID
NO: 303)
DIQMTQSPSSLSASVGDRVTITCSVSSSVSSIYLHWYQQKPGKAPKLLIYSTSNLASGV
PSRFSGSGSGTDFTLTISSLQPEDFATYYCQHHSGHPLTFGGGTKVEIK
>Heavy Chain of hucMET27Gv1.3 IgG (SEQ ID NO: 304)
EVQLVESGGGLVQPGGSLRLSCAASGFTFSSYDMSWVRQAPGKGLEWVATINSNGV
SIYYPDSVKGRFTISRDNAKNSLYLQMNSLRAEDTAVYYCAREEITTEMDYWGQGT
LVTVSS
>Light Chain of hucMET27Gv1.3 IgG (SEQ ID NO: 305)
EIVLTQSPATLSLSPGERATLSCRASESVDSYGNSFIHWYQQKPGQAPRLLIYRASNLE
SGIPARFSGSGSGTDFTLTISSLEPEDFAVYYCQQSNEEPLTFGQGTKVELK
>Heavy Chain CDR1 of hucMET27Gv1.3 (SEQ ID NO: 306)
GFTFSSYDMS
>Heavy Chain CDR2 of hucMET27Gv1.3 (SEQ ID NO: 307)
TINSNGVSIYYPDSVKG
>Heavy Chain CDR3 of hucMET27Gv1.3 (SEQ ID NO: 308)
AREEITTEMDY
>Light Chain CDR1 of hucMET27Gv1.3 (SEQ ID NO: 309)
RASESVDSYGNSFIH
>Light Chain CDR2 of hucMET27Gv1.3 (SEQ ID NO: 310)
RASNLES
>Light Chain CDR3 of hucMET27Gv1.3 (SEQ ID NO: 311)
QQSNEEPLT
>Heavy Chain of hucMET27Gv1.3 IgG histidine scanning variant #1 (SEQ ID NO: 312)
EVQLVESGGGLVQPGGSLRLSCAASHFTFSSYDMSWVRQAPGKGLEWVATINSNGV
SIYYPDSVKGRFTISRDNAKNSLYLQMNSLRAEDTAVYYCAREEITTEMDYWGQGT
LVTVSS
>Heavy Chain of hucMET27Gv1.3 IgG histidine scanning variant #2 (SEQ ID NO: 313)
EVQLVESGGGLVQPGGSLRLSCAASGHTFSSYDMSWVRQAPGKGLEWVATINSNGV
SIYYPDSVKGRFTISRDNAKNSLYLQMNSLRAEDTAVYYCAREEITTEMDYWGQGT
LVTVSS
>Heavy Chain of hucMET27Gv1.3 IgG histidine scanning variant #3 (SEQ ID NO: 314)
EVQLVESGGGLVQPGGSLRLSCAASGFHFSSYDMSWVRQAPGKGLEWVATINSNGV
SIYYPDSVKGRFTISRDNAKNSLYLQMNSLRAEDTAVYYCAREEITTEMDYWGQGT
LVTVSS
>Heavy Chain of hucMET27Gv1.3 IgG histidine scanning variant #4 (SEQ ID NO: 315)
EVQLVESGGGLVQPGGSLRLSCAASGFTHSSYDMSWVRQAPGKGLEWVATINSNGV
SIYYPDSVKGRFTISRDNAKNSLYLQMNSLRAEDTAVYYCAREEITTEMDYWGQGT
LVTVSS
>Heavy Chain of hucMET27Gv1.3 IgG histidine scanning variant #5 (SEQ ID NO: 316)
EVQLVESGGGLVQPGGSLRLSCAASGFTFHSYDMSWVRQAPGKGLEWVATINSNGV
SIYYPDSVKGRFTISRDNAKNSLYLQMNSLRAEDTAVYYCAREEITTEMDYWGQGT
LVTVSS
>Heavy Chain of hucMET27Gv1.3 IgG histidine scanning variant #6 (SEQ ID NO: 317)
EVQLVESGGGLVQPGGSLRLSCAASGFTFSHYDMSWVRQAPGKGLEWVATINSNGV
SIYYPDSVKGRFTISRDNAKNSLYLQMNSLRAEDTAVYYCAREEITTEMDYWGQGT
LVTVSS
>Heavy Chain of hucMET27Gv1.3 IgG histidine scanning variant #7 (SEQ ID NO: 318)
EVQLVESGGGLVQPGGSLRLSCAASGFTFSSHDMSWVRQAPGKGLEWVATINSNGV
SIYYPDSVKGRFTISRDNAKNSLYLQMNSLRAEDTAVYYCAREEITTEMDYWGQGT
LVTVSS
>Heavy Chain of hucMET27Gv1.3 IgG histidine scanning variant #8 (SEQ ID NO: 319)
EVQLVESGGGLVQPGGSLRLSCAASGFTFSSYHMSWVRQAPGKGLEWVATINSNGV
SIYYPDSVKGRFTISRDNAKNSLYLQMNSLRAEDTAVYYCAREEITTEMDYWGQGT
LVTVSS
>Heavy Chain of hucMET27Gv1.3 IgG histidine scanning variant #9 (SEQ ID NO: 320)
EVQLVESGGGLVQPGGSLRLSCAASGFTFSSYDHSWVRQAPGKGLEWVATINSNGV
SIYYPDSVKGRFTISRDNAKNSLYLQMNSLRAEDTAVYYCAREEITTEMDYWGQGT
LVTVSS
>Heavy Chain of hucMET27Gv1.3 IgG histidine scanning variant #10 (SEQ ID NO: 321)
EVQLVESGGGLVQPGGSLRLSCAASGFTFSSYDMHWVRQAPGKGLEWVATINSNGV
SIYYPDSVKGRFTISRDNAKNSLYLQMNSLRAEDTAVYYCAREEITTEMDYWGQGT
LVTVSS
>Heavy Chain of hucMET27Gv1.3 IgG histidine scanning variant #11 (SEQ ID NO: 322)
EVQLVESGGGLVQPGGSLRLSCAASGFTFSSYDMSWVRQAPGKGLEWVAHINSNGV
SIYYPDSVKGRFTISRDNAKNSLYLQMNSLRAEDTAVYYCAREEITTEMDYWGQGT
LVTVSS
>Heavy Chain of hucMET27Gv1.3 IgG histidine scanning variant #12 (SEQ ID NO: 323)
EVQLVESGGGLVQPGGSLRLSCAASGFTFSSYDMSWVRQAPGKGLEWVATHNSNG
VSIYYPDSVKGRFTISRDNAKNSLYLQMNSLRAEDTAVYYCAREEITTEMDYWGQG
TLVTVSS
>Heavy Chain of hucMET27Gv1.3 IgG histidine scanning variant #13 (SEQ ID NO: 324)
EVQLVESGGGLVQPGGSLRLSCAASGFTFSSYDMSWVRQAPGKGLEWVATIHSNGV
SIYYPDSVKGRFTISRDNAKNSLYLQMNSLRAEDTAVYYCAREEITTEMDYWGQGT
LVTVSS
>Heavy Chain of hucMET27Gv1.3 IgG histidine scanning variant #14 (SEQ ID NO: 325)
EVQLVESGGGLVQPGGSLRLSCAASGFTFSSYDMSWVRQAPGKGLEWVATINHNGV
SIYYPDSVKGRFTISRDNAKNSLYLQMNSLRAEDTAVYYCAREEITTEMDYWGQGT
LVTVSS
>Heavy Chain of hucMET27Gv1.3 IgG histidine scanning variant #15 (SEQ ID NO: 326)
EVQLVESGGGLVQPGGSLRLSCAASGFTFSSYDMSWVRQAPGKGLEWVATINSHGV
SIYYPDSVKGRFTISRDNAKNSLYLQMNSLRAEDTAVYYCAREEITTEMDYWGQGT
LVTVSS
>Heavy Chain of hucMET27Gv1.3 IgG histidine scanning variant #16 (SEQ ID NO: 327)
EVQLVESGGGLVQPGGSLRLSCAASGFTFSSYDMSWVRQAPGKGLEWVATINSNHV
SIYYPDSVKGRFTISRDNAKNSLYLQMNSLRAEDTAVYYCAREEITTEMDYWGQGT
LVTVSS
>Heavy Chain of hucMET27Gv1.3 IgG histidine scanning variant #17 (SEQ ID NO: 328)
EVQLVESGGGLVQPGGSLRLSCAASGFTFSSYDMSWVRQAPGKGLEWVATINSNGH
SIYYPDSVKGRFTISRDNAKNSLYLQMNSLRAEDTAVYYCAREEITTEMDYWGQGT
LVTVSS
>Heavy Chain of hucMET27Gv1.3 IgG histidine scanning variant #18 (SEQ ID NO: 329)
EVQLVESGGGLVQPGGSLRLSCAASGFTFSSYDMSWVRQAPGKGLEWVATINSNGV
HIYYPDSVKGRFTISRDNAKNSLYLQMNSLRAEDTAVYYCAREEITTEMDYWGQGT
LVTVSS
>Heavy Chain of hucMET27Gv1.3 IgG histidine scanning variant #19 (SEQ ID NO: 330)
EVQLVESGGGLVQPGGSLRLSCAASGFTFSSYDMSWVRQAPGKGLEWVATINSNGV
SHYYPDSVKGRFTISRDNAKNSLYLQMNSLRAEDTAVYYCAREEITTEMDYWGQGT
LVTVSS
>Heavy Chain of hucMET27Gv1.3 IgG histidine scanning variant #20 (SEQ ID NO: 331)
EVQLVESGGGLVQPGGSLRLSCAASGFTFSSYDMSWVRQAPGKGLEWVATINSNGV
SIHYPDSVKGRFTISRDNAKNSLYLQMNSLRAEDTAVYYCAREEITTEMDYWGQGT
LVTVSS
>Heavy Chain of hucMET27Gv1.3 IgG histidine scanning variant #21 (SEQ ID NO: 332)
EVQLVESGGGLVQPGGSLRLSCAASGFTFSSYDMSWVRQAPGKGLEWVATINSNGV
SIYHPDSVKGRFTISRDNAKNSLYLQMNSLRAEDTAVYYCAREEITTEMDYWGQGT
LVTVSS
>Heavy Chain of hucMET27Gv1.3 IgG histidine scanning variant #22 (SEQ ID NO: 333)
EVQLVESGGGLVQPGGSLRLSCAASGFTFSSYDMSWVRQAPGKGLEWVATINSNGV
SIYYHDSVKGRFTISRDNAKNSLYLQMNSLRAEDTAVYYCAREEITTEMDYWGQGT
LVTVSS
>Heavy Chain of hucMET27Gv1.3 IgG histidine scanning variant #23 (SEQ ID NO: 334)
EVQLVESGGGLVQPGGSLRLSCAASGFTFSSYDMSWVRQAPGKGLEWVATINSNGV
SIYYPHSVKGRFTISRDNAKNSLYLQMNSLRAEDTAVYYCAREEITTEMDYWGQGT
LVTVSS
>Heavy Chain of hucMET27Gv1.3 IgG histidine scanning variant #24 (SEQ ID NO: 335)
EVQLVESGGGLVQPGGSLRLSCAASGFTFSSYDMSWVRQAPGKGLEWVATINSNGV
SIYYPDHVKGRFTISRDNAKNSLYLQMNSLRAEDTAVYYCAREEITTEMDYWGQGT
LVTVSS
>Heavy Chain of hucMET27Gv1.3 IgG histidine scanning variant #25 (SEQ ID NO: 336)
EVQLVESGGGLVQPGGSLRLSCAASGFTFSSYDMSWVRQAPGKGLEWVATINSNGV
SIYYPDSHKGRFTISRDNAKNSLYLQMNSLRAEDTAVYYCAREEITTEMDYWGQGT
LVTVSS
>Heavy Chain of hucMET27Gv1.3 IgG histidine scanning variant #26 (SEQ ID NO: 337)
EVQLVESGGGLVQPGGSLRLSCAASGFTFSSYDMSWVRQAPGKGLEWVATINSNGV
SIYYPDSVHGRFTISRDNAKNSLYLQMNSLRAEDTAVYYCAREEITTEMDYWGQGT
LVTVSS
>Heavy Chain of hucMET27Gv1.3 IgG histidine scanning variant #27 (SEQ ID NO: 338)
EVQLVESGGGLVQPGGSLRLSCAASGFTFSSYDMSWVRQAPGKGLEWVATINSNGV
SIYYPDSVKHRFTISRDNAKNSLYLQMNSLRAEDTAVYYCAREEITTEMDYWGQGT
LVTVSS
>Heavy Chain of hucMET27Gv1.3 IgG histidine scanning variant #28 (SEQ ID NO: 339)
EVQLVESGGGLVQPGGSLRLSCAASGFTFSSYDMSWVRQAPGKGLEWVATINSNGV
SIYYPDSVKGRFTISRDNAKNSLYLQMNSLRAEDTAVYYCHREEITTEMDYWGQGT
LVTVSS
>Heavy Chain of hucMET27Gv1.3 IgG histidine scanning variant #29 (SEQ ID NO: 340)
EVQLVESGGGLVQPGGSLRLSCAASGFTFSSYDMSWVRQAPGKGLEWVATINSNGV
SIYYPDSVKGRFTISRDNAKNSLYLQMNSLRAEDTAVYYCAHEEITTEMDYWGQGT
LVTVSS
>Heavy Chain of hucMET27Gv1.3 IgG histidine scanning variant #30 (SEQ ID NO: 341)
EVQLVESGGGLVQPGGSLRLSCAASGFTFSSYDMSWVRQAPGKGLEWVATINSNGV
SIYYPDSVKGRFTISRDNAKNSLYLQMNSLRAEDTAVYYCARHEITTEMDYWGQGT
LVTVSS
>Heavy Chain of hucMET27Gv1.3 IgG histidine scanning variant #31 (SEQ ID NO: 342)
EVQLVESGGGLVQPGGSLRLSCAASGFTFSSYDMSWVRQAPGKGLEWVATINSNGV
SIYYPDSVKGRFTISRDNAKNSLYLQMNSLRAEDTAVYYCAREHITTEMDYWGQGT
LVTVSS
>Heavy Chain of hucMET27Gv1.3 IgG histidine scanning variant #32 (SEQ ID NO: 343)
EVQLVESGGGLVQPGGSLRLSCAASGFTFSSYDMSWVRQAPGKGLEWVATINSNGV
SIYYPDSVKGRFTISRDNAKNSLYLQMNSLRAEDTAVYYCAREEHTTEMDYWGQGT
LVTVSS
>Heavy Chain of hucMET27Gv1.3 IgG histidine scanning variant #33 (SEQ ID NO: 344)
EVQLVESGGGLVQPGGSLRLSCAASGFTFSSYDMSWVRQAPGKGLEWVATINSNGV
SIYYPDSVKGRFTISRDNAKNSLYLQMNSLRAEDTAVYYCAREEIHTEMDYWGQGT
LVTVSS
>Heavy Chain of hucMET27Gv1.3 IgG histidine scanning variant #34 (SEQ ID NO: 345)
EVQLVESGGGLVQPGGSLRLSCAASGFTFSSYDMSWVRQAPGKGLEWVATINSNGV
SIYYPDSVKGRFTISRDNAKNSLYLQMNSLRAEDTAVYYCAREEITHEMDYWGQGT
LVTVSS
>Heavy Chain of hucMET27Gv1.3 IgG histidine scanning variant #35 (SEQ ID NO: 346)
EVQLVESGGGLVQPGGSLRLSCAASGFTFSSYDMSWVRQAPGKGLEWVATINSNGV
SIYYPDSVKGRFTISRDNAKNSLYLQMNSLRAEDTAVYYCAREEITTHMDYWGQGT
LVTVSS
>Heavy Chain of hucMET27Gv1.3 IgG histidine scanning variant #36 (SEQ ID NO: 347)
EVQLVESGGGLVQPGGSLRLSCAASGFTFSSYDMSWVRQAPGKGLEWVATINSNGV
SIYYPDSVKGRFTISRDNAKNSLYLQMNSLRAEDTAVYYCAREEITTEHDYWGQGTL
VTVSS
>Heavy Chain of hucMET27Gv1.3 IgG histidine scanning variant #37 (SEQ ID NO: 348)
EVQLVESGGGLVQPGGSLRLSCAASGFTFSSYDMSWVRQAPGKGLEWVATINSNGV
SIYYPDSVKGRFTISRDNAKNSLYLQMNSLRAEDTAVYYCAREEITTEMHYWGQGT
LVTVSS
>Heavy Chain of hucMET27Gv1.3 IgG histidine scanning variant #38 (SEQ ID NO: 349)
EVQLVESGGGLVQPGGSLRLSCAASGFTFSSYDMSWVRQAPGKGLEWVATINSNGV
SIYYPDSVKGRFTISRDNAKNSLYLQMNSLRAEDTAVYYCAREEITTEMDHWGQGT
LVTVSS
>Light Chain of hucMET27Gv1.3 IgG histidine scanning variant #1 (SEQ ID NO: 350)
EIVLTQSPATLSLSPGERATLSCHASESVDSYGNSFIHWYQQKPGQAPRLLIYRASNLE
SGIPARFSGSGSGTDFTLTISSLEPEDFAVYYCQQSNEEPLTFGQGTKVELK
>Light Chain of hucMET27Gv1.3 IgG histidine scanning variant #2 (SEQ ID NO: 351)
EIVLTQSPATLSLSPGERATLSCRHSESVDSYGNSFIHWYQQKPGQAPRLLIYRASNLE
SGIPARFSGSGSGTDFTLTISSLEPEDFAVYYCQQSNEEPLTFGQGTKVELK
>Light Chain of hucMET27Gv1.3 IgG histidine scanning variant #3 (SEQ ID NO: 352)
EIVLTQSPATLSLSPGERATLSCRAHESVDSYGNSFIHWYQQKPGQAPRLLIYRASNL
ESGIPARFSGSGSGTDFTLTISSLEPEDFAVYYCQQSNEEPLTFGQGTKVELK
>Light Chain of hucMET27Gv1.3 IgG histidine scanning variant #4 (SEQ ID NO: 353)
EIVLTQSPATLSLSPGERATLSCRASHSVDSYGNSFIHWYQQKPGQAPRLLIYRASNL
ESGIPARFSGSGSGTDFTLTISSLEPEDFAVYYCQQSNEEPLTFGQGTKVELK
>Light Chain of hucMET27Gv1.3 IgG histidine scanning variant #5 (SEQ ID NO: 354)
EIVLTQSPATLSLSPGERATLSCRASEHVDSYGNSFIHWYQQKPGQAPRLLIYRASNL
ESGIPARFSGSGSGTDFTLTISSLEPEDFAVYYCQQSNEEPLTFGQGTKVELK
>Light Chain of hucMET27Gv1.3 IgG histidine scanning variant #6 (SEQ ID NO: 355)
EIVLTQSPATLSLSPGERATLSCRASESHDSYGNSFIHWYQQKPGQAPRLLIYRASNLE
SGIPARFSGSGSGTDFTLTISSLEPEDFAVYYCQQSNEEPLTFGQGTKVELK
>Light Chain of hucMET27Gv1.3 IgG histidine scanning variant #7 (SEQ ID NO: 356)
EIVLTQSPATLSLSPGERATLSCRASESVHSYGNSFIHWYQQKPGQAPRLLIYRASNLE
SGIPARFSGSGSGTDFTLTISSLEPEDFAVYYCQQSNEEPLTFGQGTKVELK
>Light Chain of hucMET27Gv1.3 IgG histidine scanning variant #8 (SEQ ID NO: 357)
EIVLTQSPATLSLSPGERATLSCRASESVDHYGNSFIHWYQQKPGQAPRLLIYRASNL
ESGIPARFSGSGSGTDFTLTISSLEPEDFAVYYCQQSNEEPLTFGQGTKVELK
>Light Chain of hucMET27Gv1.3 IgG histidine scanning variant #9 (SEQ ID NO: 358)
EIVLTQSPATLSLSPGERATLSCRASESVDSHGNSFIHWYQQKPGQAPRLLIYRASNLE
SGIPARFSGSGSGTDFTLTISSLEPEDFAVYYCQQSNEEPLTFGQGTKVELK
>Light Chain of hucMET27Gv1.3 IgG histidine scanning variant #10 (SEQ ID NO: 359)
EIVLTQSPATLSLSPGERATLSCRASESVDSYHNSFIHWYQQKPGQAPRLLIYRASNLE
SGIPARFSGSGSGTDFTLTISSLEPEDFAVYYCQQSNEEPLTFGQGTKVELK
>Light Chain of hucMET27Gv1.3 IgG histidine scanning variant #11 (SEQ ID NO: 360)
EIVLTQSPATLSLSPGERATLSCRASESVDSYGHSFIHWYQQKPGQAPRLLIYRASNLE
SGIPARFSGSGSGTDFTLTISSLEPEDFAVYYCQQSNEEPLTFGQGTKVELK
>Light Chain of hucMET27Gv1.3 IgG histidine scanning variant #12 (SEQ ID NO: 361)
EIVLTQSPATLSLSPGERATLSCRASESVDSYGNHFIHWYQQKPGQAPRLLIYRASNL
ESGIPARFSGSGSGTDFTLTISSLEPEDFAVYYCQQSNEEPLTFGQGTKVELK
>Light Chain of hucMET27Gv1.3 IgG histidine scanning variant #13 (SEQ ID NO: 362)
EIVLTQSPATLSLSPGERATLSCRASESVDSYGNSHIHWYQQKPGQAPRLLIYRASNL
ESGIPARFSGSGSGTDFTLTISSLEPEDFAVYYCQQSNEEPLTFGQGTKVELK
>Light Chain of hucMET27Gv1.3 IgG histidine scanning variant #14 (SEQ ID NO: 363)
EIVLTQSPATLSLSPGERATLSCRASESVDSYGNSFHHWYQQKPGQAPRLLIYRASNL
ESGIPARFSGSGSGTDFTLTISSLEPEDFAVYYCQQSNEEPLTFGQGTKVELK
>Light Chain of hucMET27Gv1.3 IgG histidine scanning variant #15 (SEQ ID NO: 364)
EIVLTQSPATLSLSPGERATLSCRASESVDSYGNSFIAWYQQKPGQAPRLLIYRASNLE
SGIPARFSGSGSGTDFTLTISSLEPEDFAVYYCQQSNEEPLTFGQGTKVELK
>Light Chain of hucMET27Gv1.3 IgG histidine scanning variant #16 (SEQ ID NO: 365)
EIVLTQSPATLSLSPGERATLSCRASESVDSYGNSFIHWYQQKPGQAPRLLIYHASNLE
SGIPARFSGSGSGTDFTLTISSLEPEDFAVYYCQQSNEEPLTFGQGTKVELK
>Light Chain of hucMET27Gv1.3 IgG histidine scanning variant #17 (SEQ ID NO: 366)
EIVLTQSPATLSLSPGERATLSCRASESVDSYGNSFIHWYQQKPGQAPRLLIYRHSNLE
SGIPARFSGSGSGTDFTLTISSLEPEDFAVYYCQQSNEEPLTFGQGTKVELK
>Light Chain of hucMET27Gv1.3 IgG histidine scanning variant #18 (SEQ ID NO: 367)
EIVLTQSPATLSLSPGERATLSCRASESVDSYGNSFIHWYQQKPGQAPRLLIYRAHNL
ESGIPARFSGSGSGTDFTLTISSLEPEDFAVYYCQQSNEEPLTFGQGTKVELK
>Light Chain of hucMET27Gv1.3 IgG histidine scanning variant #19 (SEQ ID NO: 368)
EIVLTQSPATLSLSPGERATLSCRASESVDSYGNSFIHWYQQKPGQAPRLLIYRASHLE
SGIPARFSGSGSGTDFTLTISSLEPEDFAVYYCQQSNEEPLTFGQGTKVELK
>Light Chain of hucMET27Gv1.3 IgG histidine scanning variant #20 (SEQ ID NO: 369)
EIVLTQSPATLSLSPGERATLSCRASESVDSYGNSFIHWYQQKPGQAPRLLIYRASNH
ESGIPARFSGSGSGTDFTLTISSLEPEDFAVYYCQQSNEEPLTFGQGTKVELK
>Light Chain of hucMET27Gv1.3 IgG histidine scanning variant #21 (SEQ ID NO: 370)
EIVLTQSPATLSLSPGERATLSCRASESVDSYGNSFIHWYQQKPGQAPRLLIYRASNL
HSGIPARFSGSGSGTDFTLTISSLEPEDFAVYYCQQSNEEPLTFGQGTKVELK
>Light Chain of hucMET27Gv1.3 IgG histidine scanning variant #22 (SEQ ID NO: 371)
EIVLTQSPATLSLSPGERATLSCRASESVDSYGNSFIHWYQQKPGQAPRLLIYRASNLE
HGIPARFSGSGSGTDFTLTISSLEPEDFAVYYCQQSNEEPLTFGQGTKVELK
>Light Chain of hucMET27Gv1.3 IgG histidine scanning variant #23 (SEQ ID NO: 372)
EIVLTQSPATLSLSPGERATLSCRASESVDSYGNSFIHWYQQKPGQAPRLLIYRASNLE
SGIPARFSGSGSGTDFTLTISSLEPEDFAVYYCHQSNEEPLTFGQGTKVELK
>Light Chain of hucMET27Gv1.3 IgG histidine scanning variant #24 (SEQ ID NO: 373)
EIVLTQSPATLSLSPGERATLSCRASESVDSYGNSFIHWYQQKPGQAPRLLIYRASNLE
SGIPARFSGSGSGTDFTLTISSLEPEDFAVYYCQHSNEEPLTFGQGTKVELK
>Light Chain of hucMET27Gv1.3 IgG histidine scanning variant #25 (SEQ ID NO: 374)
EIVLTQSPATLSLSPGERATLSCRASESVDSYGNSFIHWYQQKPGQAPRLLIYRASNLE
SGIPARFSGSGSGTDFTLTISSLEPEDFAVYYCQQHNEEPLTFGQGTKVELK
>Light Chain of hucMET27Gv1.3 IgG histidine scanning variant #26 (SEQ ID NO: 375)
EIVLTQSPATLSLSPGERATLSCRASESVDSYGNSFIHWYQQKPGQAPRLLIYRASNLE
SGIPARFSGSGSGTDFTLTISSLEPEDFAVYYCQQSHEEPLTFGQGTKVELK
>Light Chain of hucMET27Gv1.3 IgG histidine scanning variant #27 (SEQ ID NO: 376)
EIVLTQSPATLSLSPGERATLSCRASESVDSYGNSFIHWYQQKPGQAPRLLIYRASNLE
SGIPARFSGSGSGTDFTLTISSLEPEDFAVYYCQQSNHEPLTFGQGTKVELK
>Light Chain of hucMET27Gv1.3 IgG histidine scanning variant #28 (SEQ ID NO: 377)
EIVLTQSPATLSLSPGERATLSCRASESVDSYGNSFIHWYQQKPGQAPRLLIYRASNLE
SGIPARFSGSGSGTDFTLTISSLEPEDFAVYYCQQSNEHPLTFGQGTKVELK
>Light Chain of hucMET27Gv1.3 IgG histidine scanning variant #29 (SEQ ID NO: 378)
EIVLTQSPATLSLSPGERATLSCRASESVDSYGNSFIHWYQQKPGQAPRLLIYRASNLE
SGIPARFSGSGSGTDFTLTISSLEPEDFAVYYCQQSNEEHLTFGQGTKVELK
>Light Chain of hucMET27Gv1.3 IgG histidine scanning variant #30 (SEQ ID NO: 379)
EIVLTQSPATLSLSPGERATLSCRASESVDSYGNSFIHWYQQKPGQAPRLLIYRASNLE
SGIPARFSGSGSGTDFTLTISSLEPEDFAVYYCQQSNEEPHTFGQGTKVELK
>Light Chain of hucMET27Gv1.3 IgG histidine scanning variant #31 (SEQ ID NO: 380)
EIVLTQSPATLSLSPGERATLSCRASESVDSYGNSFIHWYQQKPGQAPRLLIYRASNLE
SGIPARFSGSGSGTDFTLTISSLEPEDFAVYYCQQSNEEPLHFGQGTKVELK
>Heavy Chain Combinations of hucMET27Gv1.3 IgG histidine scanning variant #1 (SEQ ID
NO: 381)
EVQLVESGGGLVQPGGSLRLSCAASGHTFSSYDMSWVRQAPGKGLEWVATINSNGV
SIYHPDSVKGRFTISRDNAKNSLYLQMNSLRAEDTAVYYCAREEITTEMDYWGQGT
LVTVSS
>Heavy Chain Combinations of hucMET27Gv1.3 IgG histidine scanning variant #2 (SEQ ID
NO: 382)
EVQLVESGGGLVQPGGSLRLSCAASGHTFSSYDMSWVRQAPGKGLEWVATINSNGV
SIYYPDSVKHRFTISRDNAKNSLYLQMNSLRAEDTAVYYCAREEITTEMDYWGQGT
LVTVSS
>Heavy Chain Combinations of hucMET27Gv1.3 IgG histidine scanning variant #3 (SEQ ID
NO: 383)
EVQLVESGGGLVQPGGSLRLSCAASGHTFSSYDMSWVRQAPGKGLEWVATINSNGV
SIYYPDSVKGRFTISRDNAKNSLYLQMNSLRAEDTAVYYCAREEITTEHDYWGQGTL
VTVSS
>Heavy Chain Combinations of hucMET27Gv1.3 IgG histidine scanning variant #4 (SEQ ID
NO: 384)
EVQLVESGGGLVQPGGSLRLSCAASGHTFSSYDMSWVRQAPGKGLEWVATINSNGV
SIYYPDSVKGRFTISRDNAKNSLYLQMNSLRAEDTAVYYCAREEITTEMDHWGQGT
LVTVSS
>Heavy Chain Combinations of hucMET27Gv1.3 IgG histidine scanning variant #5 (SEQ ID
NO: 385)
EVQLVESGGGLVQPGGSLRLSCAASGFTFSSYDMSWVRQAPGKGLEWVATINSNGV
SIYHPDSVKHRFTISRDNAKNSLYLQMNSLRAEDTAVYYCAREEITTEMDYWGQGT
LVTVSS
>Heavy Chain Combinations of hucMET27Gv1.3 IgG histidine scanning variant #6 (SEQ ID
NO: 386)
EVQLVESGGGLVQPGGSLRLSCAASGFTFSSYDMSWVRQAPGKGLEWVATINSNGV
SIYHPDSVKGRFTISRDNAKNSLYLQMNSLRAEDTAVYYCAREEITTEHDYWGQGTL
VTVSS
>Heavy Chain Combinations of hucMET27Gv1.3 IgG histidine scanning variant #7 (SEQ ID
NO: 387)
EVQLVESGGGLVQPGGSLRLSCAASGFTFSSYDMSWVRQAPGKGLEWVATINSNGV
SIYHPDSVKGRFTISRDNAKNSLYLQMNSLRAEDTAVYYCAREEITTEMDHWGQGT
LVTVSS
>Heavy Chain Combinations of hucMET27Gv1.3 IgG histidine scanning variant #8 (SEQ ID
NO: 388)
EVQLVESGGGLVQPGGSLRLSCAASGFTFSSYDMSWVRQAPGKGLEWVATINSNGV
SIYYPDSVKHRFTISRDNAKNSLYLQMNSLRAEDTAVYYCAREEITTEHDYWGQGTL
VTVSS
>Heavy Chain Combinations of hucMET27Gv1.3 IgG histidine scanning variant #9 (SEQ ID
NO: 389)
EVQLVESGGGLVQPGGSLRLSCAASGFTFSSYDMSWVRQAPGKGLEWVATINSNGV
SIYYPDSVKHRFTISRDNAKNSLYLQMNSLRAEDTAVYYCAREEITTEMDHWGQGT
LVTVSS
>Heavy Chain Combinations of hucMET27Gv1.3 IgG histidine scanning variant #10 (SEQ
ID NO: 390)
EVQLVESGGGLVQPGGSLRLSCAASGFTFSSYDMSWVRQAPGKGLEWVATINSNGV
SIYYPDSVKGRFTISRDNAKNSLYLQMNSLRAEDTAVYYCAREEITTEHDHWGQGTL
VTVSS
>Heavy Chain Combinations of hucMET27Gv1.3 IgG histidine scanning variant #11 (SEQ
ID NO: 391)
EVQLVESGGGLVQPGGSLRLSCAASGHTFSSYDMSWVRQAPGKGLEWVATINSNGV
SIYHPDSVKHRFTISRDNAKNSLYLQMNSLRAEDTAVYYCAREEITTEMDYWGQGT
LVTVSS
>Heavy Chain Combinations of hucMET27Gv1.3 IgG histidine scanning variant #12 (SEQ
ID NO: 392)
EVQLVESGGGLVQPGGSLRLSCAASGHTFSSYDMSWVRQAPGKGLEWVATINSNGV
SIYHPDSVKGRFTISRDNAKNSLYLQMNSLRAEDTAVYYCAREEITTEHDYWGQGTL
VTVSS
>Heavy Chain Combinations of hucMET27Gv1.3 IgG histidine scanning variant #13 (SEQ
ID NO: 393)
EVQLVESGGGLVQPGGSLRLSCAASGHTFSSYDMSWVRQAPGKGLEWVATINSNGV
SIYHPDSVKGRFTISRDNAKNSLYLQMNSLRAEDTAVYYCAREEITTEMDHWGQGT
LVTVSS
>Heavy Chain Combinations of hucMET27Gv1.3 IgG histidine scanning variant #14 (SEQ
ID NO: 394)
EVQLVESGGGLVQPGGSLRLSCAASGHTFSSYDMSWVRQAPGKGLEWVATINSNGV
SIYYPDSVKHRFTISRDNAKNSLYLQMNSLRAEDTAVYYCAREEITTEHDYWGQGTL
VTVSS
>Heavy Chain Combinations of hucMET27Gv1.3 IgG histidine scanning variant #15 (SEQ
ID NO: 395)
EVQLVESGGGLVQPGGSLRLSCAASGHTFSSYDMSWVRQAPGKGLEWVATINSNGV
SIYYPDSVKHRFTISRDNAKNSLYLQMNSLRAEDTAVYYCAREEITTEMDHWGQGT
LVTVSS
>Heavy Chain Combinations of hucMET27Gv1.3 IgG histidine scanning variant #16 (SEQ
ID NO: 396)
EVQLVESGGGLVQPGGSLRLSCAASGHTFSSYDMSWVRQAPGKGLEWVATINSNGV
SIYYPDSVKGRFTISRDNAKNSLYLQMNSLRAEDTAVYYCAREEITTEHDHWGQGTL
VTVSS
>Heavy Chain Combinations of hucMET27Gv1.3 IgG histidine scanning variant #17 (SEQ
ID NO: 397)
EVQLVESGGGLVQPGGSLRLSCAASGFTFSSYDMSWVRQAPGKGLEWVATINSNGV
SIYHPDSVKHRFTISRDNAKNSLYLQMNSLRAEDTAVYYCAREEITTEHDYWGQGTL
VTVSS
>Heavy Chain Combinations of hucMET27Gv1.3 IgG histidine scanning variant #18 (SEQ
ID NO: 398)
EVQLVESGGGLVQPGGSLRLSCAASGFTFSSYDMSWVRQAPGKGLEWVATINSNGV
SIYHPDSVKHRFTISRDNAKNSLYLQMNSLRAEDTAVYYCAREEITTEMDHWGQGT
LVTVSS
>Heavy Chain Combinations of hucMET27Gv1.3 IgG histidine scanning variant #19 (SEQ
ID NO: 399)
EVQLVESGGGLVQPGGSLRLSCAASGFTFSSYDMSWVRQAPGKGLEWVATINSNGV
SIYHPDSVKGRFTISRDNAKNSLYLQMNSLRAEDTAVYYCAREEITTEHDHWGQGTL
VTVSS
>Heavy Chain Combinations of hucMET27Gv1.3 IgG histidine scanning variant #20 (SEQ
ID NO: 400)
EVQLVESGGGLVQPGGSLRLSCAASGFTFSSYDMSWVRQAPGKGLEWVATINSNGV
SIYYPDSVKHRFTISRDNAKNSLYLQMNSLRAEDTAVYYCAREEITTEHDHWGQGTL
VTVSS
>Heavy Chain Combinations of hucMET27Gv1.3 IgG histidine scanning variant #21 (SEQ
ID NO: 401)
EVQLVESGGGLVQPGGSLRLSCAASGHTFSSYDMSWVRQAPGKGLEWVATINSNGV
SIYYPDSVKGRFTISRDNAKNSLYLQMNSLRAEDTAVYYCAREEITHEMDYWGQGT
LVTVSS
>Heavy Chain Combinations of hucMET27Gv1.3 IgG histidine scanning variant #22 (SEQ
ID NO: 402)
EVQLVESGGGLVQPGGSLRLSCAASGFTFSSYDMSWVRQAPGKGLEWVATINSNGV
SIYYPDSVKGRFTISRDNAKNSLYLQMNSLRAEDTAVYYCAREEITHEHDYWGQGT
LVTVSS
>Heavy Chain Combinations of hucMET27Gv1.3 IgG histidine scanning variant #23 (SEQ
ID NO: 403)
EVQLVESGGGLVQPGGSLRLSCAASGFTFSSYDMSWVRQAPGKGLEWVATINSNGV
SIYYPDSVKGRFTISRDNAKNSLYLQMNSLRAEDTAVYYCAREEITHEMDHWGQGT
LVTVSS
>Heavy Chain Combinations of hucMET27Gv1.3 IgG histidine scanning variant #24 (SEQ
ID NO: 404)
EVQLVESGGGLVQPGGSLRLSCAASGFTFSSYDMSWVRQAPGKGLEWVATINSNGV
SIYHPDSVKGRFTISRDNAKNSLYLQMNSLRAEDTAVYYCAREEITHEMDYWGQGT
LVTVSS
>Heavy Chain Combinations of hucMET27Gv1.3 IgG histidine scanning variant #25 (SEQ
ID NO: 405)
EVQLVESGGGLVQPGGSLRLSCAASGFTFSSYDMSWVRQAPGKGLEWVATINSNGV
SIYYPDSVKGRFTISRDNAKNSLYLQMNSLRAEDTAVYYCAREEITHEMDYWGQGT
LVTVSS
>Heavy Chain Combinations of hucMET27Gv1.3 IgG histidine scanning variant #26 (SEQ
ID NO: 406)
EVQLVESGGGLVQPGGSLRLSCAASGHTFSSYDMSWVRQAPGKGLEWVATINSNGV
SIYHPDSVKGRFTISRDNAKNSLYLQMNSLRAEDTAVYYCAREEITHEMDYWGQGT
LVTVSS
>Heavy Chain Combinations of hucMET27Gv1.3 IgG histidine scanning variant #27 (SEQ
ID NO: 407)
EVQLVESGGGLVQPGGSLRLSCAASGHTFSSYDMSWVRQAPGKGLEWVATINSNGV
SIYYPDSVKHRFTISRDNAKNSLYLQMNSLRAEDTAVYYCAREEITHEMDYWGQGT
LVTVSS
>Heavy Chain Combinations of hucMET27Gv1.3 IgG histidine scanning variant #28 (SEQ
ID NO: 408)
EVQLVESGGGLVQPGGSLRLSCAASGHTFSSYDMSWVRQAPGKGLEWVATINSNGV
SIYYPDSVKGRFTISRDNAKNSLYLQMNSLRAEDTAVYYCAREEITHEHDYWGQGT
LVTVSS
>Heavy Chain Combinations of hucMET27Gv1.3 IgG histidine scanning variant #29 (SEQ
ID NO: 409)
EVQLVESGGGLVQPGGSLRLSCAASGHTFSSYDMSWVRQAPGKGLEWVATINSNGV
SIYYPDSVKGRFTISRDNAKNSLYLQMNSLRAEDTAVYYCAREEITHEMDHWGQGT
LVTVSS
>Heavy Chain Combinations of hucMET27Gv1.3 IgG histidine scanning variant #30 (SEQ
ID NO: 410)
EVQLVESGGGLVQPGGSLRLSCAASGFTFSSYDMSWVRQAPGKGLEWVATINSNGV
SIYHPDSVKHRFTISRDNAKNSLYLQMNSLRAEDTAVYYCAREEITHEMDYWGQGT
LVTVSS
>Heavy Chain Combinations of hucMET27Gv1.3 IgG histidine scanning variant #31 (SEQ
ID NO: 411)
EVQLVESGGGLVQPGGSLRLSCAASGFTFSSYDMSWVRQAPGKGLEWVATINSNGV
SIYHPDSVKGRFTISRDNAKNSLYLQMNSLRAEDTAVYYCAREEITHEHDYWGQGT
LVTVSS
>Heavy Chain Combinations of hucMET27Gv1.3 IgG histidine scanning variant #32 (SEQ
ID NO: 412)
EVQLVESGGGLVQPGGSLRLSCAASGFTFSSYDMSWVRQAPGKGLEWVATINSNGV
SIYHPDSVKGRFTISRDNAKNSLYLQMNSLRAEDTAVYYCAREEITHEMDHWGQGT
LVTVSS
>Heavy Chain Combinations of hucMET27Gv1.3 IgG histidine scanning variant #33 (SEQ
ID NO: 413)
EVQLVESGGGLVQPGGSLRLSCAASGFTFSSYDMSWVRQAPGKGLEWVATINSNGV
SIYYPDSVKHRFTISRDNAKNSLYLQMNSLRAEDTAVYYCAREEITHEHDYWGQGT
LVTVSS
>Heavy Chain Combinations of hucMET27Gv1.3 IgG histidine scanning variant #34 (SEQ
ID NO: 414)
EVQLVESGGGLVQPGGSLRLSCAASGFTFSSYDMSWVRQAPGKGLEWVATINSNGV
SIYYPDSVKHRFTISRDNAKNSLYLQMNSLRAEDTAVYYCAREEITHEMDHWGQGT
LVTVSS
>Heavy Chain Combinations of hucMET27Gv1.3 IgG histidine scanning variant #35 (SEQ
ID NO: 415)
EVQLVESGGGLVQPGGSLRLSCAASGFTFSSYDMSWVRQAPGKGLEWVATINSNGV
SIYYPDSVKGRFTISRDNAKNSLYLQMNSLRAEDTAVYYCAREEITHEHDHWGQGT
LVTVSS
>Heavy Chain Combinations of hucMET27Gv1.3 IgG histidine scanning variant #36 (SEQ
ID NO: 416)
EVQLVESGGGLVQPGGSLRLSCAASGHTFSSYDMSWVRQAPGKGLEWVATINSNGV
SIYHPDSVKHRFTISRDNAKNSLYLQMNSLRAEDTAVYYCAREEITHEMDYWGQGT
LVTVSS
>Heavy Chain Combinations of hucMET27Gv1.3 IgG histidine scanning variant #37 (SEQ
ID NO: 417)
EVQLVESGGGLVQPGGSLRLSCAASGHTFSSYDMSWVRQAPGKGLEWVATINSNGV
SIYHPDSVKGRFTISRDNAKNSLYLQMNSLRAEDTAVYYCAREEITHEHDYWGQGT
LVTVSS
>Heavy Chain Combinations of hucMET27Gv1.3 IgG histidine scanning variant #38 (SEQ
ID NO: 418)
EVQLVESGGGLVQPGGSLRLSCAASGHTFSSYDMSWVRQAPGKGLEWVATINSNGV
SIYHPDSVKGRFTISRDNAKNSLYLQMNSLRAEDTAVYYCAREEITHEMDHWGQGT
LVTVSS
>Heavy Chain Combinations of hucMET27Gv1.3 IgG histidine scanning variant #39 (SEQ
ID NO: 419)
EVQLVESGGGLVQPGGSLRLSCAASGHTFSSYDMSWVRQAPGKGLEWVATINSNGV
SIYYPDSVKHRFTISRDNAKNSLYLQMNSLRAEDTAVYYCAREEITHEHDYWGQGT
LVTVSS
>Heavy Chain Combinations of hucMET27Gv1.3 IgG histidine scanning variant #40 (SEQ
ID NO: 420)
EVQLVESGGGLVQPGGSLRLSCAASGHTFSSYDMSWVRQAPGKGLEWVATINSNGV
SIYYPDSVKHRFTISRDNAKNSLYLQMNSLRAEDTAVYYCAREEITHEMDHWGQGT
LVTVSS
>Heavy Chain Combinations of hucMET27Gv1.3 IgG histidine scanning variant #41 (SEQ
ID NO: 421)
EVQLVESGGGLVQPGGSLRLSCAASGHTFSSYDMSWVRQAPGKGLEWVATINSNGV
SIYYPDSVKGRFTISRDNAKNSLYLQMNSLRAEDTAVYYCAREEITHEHDHWGQGT
LVTVSS
>Heavy Chain Combinations of hucMET27Gv1.3 IgG histidine scanning variant #42 (SEQ
ID NO: 422)
EVQLVESGGGLVQPGGSLRLSCAASGFTFSSYDMSWVRQAPGKGLEWVATINSNGV
SIYHPDSVKHRFTISRDNAKNSLYLQMNSLRAEDTAVYYCAREEITHEHDYWGQGT
LVTVSS
>Heavy Chain Combinations of hucMET27Gv1.3 IgG histidine scanning variant #43 (SEQ
ID NO: 423)
EVQLVESGGGLVQPGGSLRLSCAASGFTFSSYDMSWVRQAPGKGLEWVATINSNGV
SIYHPDSVKHRFTISRDNAKNSLYLQMNSLRAEDTAVYYCAREEITHEMDHWGQGT
LVTVSS
>Heavy Chain Combinations of hucMET27Gv1.3 IgG histidine scanning variant #44 (SEQ
ID NO: 424)
EVQLVESGGGLVQPGGSLRLSCAASGFTFSSYDMSWVRQAPGKGLEWVATINSNGV
SIYHPDSVKGRFTISRDNAKNSLYLQMNSLRAEDTAVYYCAREEITHEHDHWGQGT
LVTVSS
>Heavy Chain Combinations of hucMET27Gv1.3 IgG histidine scanning variant #45 (SEQ
ID NO: 425)
EVQLVESGGGLVQPGGSLRLSCAASGFTFSSYDMSWVRQAPGKGLEWVATINSNGV
SIYYPDSVKHRFTISRDNAKNSLYLQMNSLRAEDTAVYYCAREEITHEHDHWGQGT
LVTVSS
>Light Chain Combinations of hucMET27Gv1.3 IgG histidine scanning variant #1 (SEQ ID
NO: 426)
EIVLTQSPATLSLSPGERATLSCRASESHDSYGHSFIHWYQQKPGQAPRLLIYRASNLE
SGIPARFSGSGSGTDFTLTISSLEPEDFAVYYCQQSNEEPLTFGQGTKVELK
>Light Chain Combinations of hucMET27Gv1.3 IgG histidine scanning variant #2 (SEQ ID
NO: 427)
EIVLTQSPATLSLSPGERATLSCRASESHDSYGNSHIHWYQQKPGQAPRLLIYRASNL
ESGIPARFSGSGSGTDFTLTISSLEPEDFAVYYCQQSNEEPLTFGQGTKVELK
>Light Chain Combinations of hucMET27Gv1.3 IgG histidine scanning variant #3 (SEQ ID
NO: 428)
EIVLTQSPATLSLSPGERATLSCRASESHDSYGNSFIHWYQQKPGQAPRLLIYRASNLE
HGIPARFSGSGSGTDFTLTISSLEPEDFAVYYCQQSNEEPLTFGQGTKVELK
>Light Chain Combinations of hucMET27Gv1.3 IgG histidine scanning variant #4 (SEQ ID
NO: 429)
EIVLTQSPATLSLSPGERATLSCRASESHDSYGNSFIHWYQQKPGQAPRLLIYRASNLE
SGIPARFSGSGSGTDFTLTISSLEPEDFAVYYCQQSNEEHLTFGQGTKVELK
>Light Chain Combinations of hucMET27Gv1.3 IgG histidine scanning variant #5 (SEQ ID
NO: 430)
EIVLTQSPATLSLSPGERATLSCRASESVDSYGHSHIHWYQQKPGQAPRLLIYRASNL
ESGIPARFSGSGSGTDFTLTISSLEPEDFAVYYCQQSNEEPLTFGQGTKVELK
>Light Chain Combinations of hucMET27Gv1.3 IgG histidine scanning variant #6 (SEQ ID
NO: 431)
EIVLTQSPATLSLSPGERATLSCRASESVDSYGHSFIHWYQQKPGQAPRLLIYRASNLE
HGIPARFSGSGSGTDFTLTISSLEPEDFAVYYCQQSNEEPLTFGQGTKVELK
>Light Chain Combinations of hucMET27Gv1.3 IgG histidine scanning variant #7 (SEQ ID
NO: 432)
EIVLTQSPATLSLSPGERATLSCRASESVDSYGHSFIHWYQQKPGQAPRLLIYRASNLE
SGIPARFSGSGSGTDFTLTISSLEPEDFAVYYCQQSNEEHLTFGQGTKVELK
>Light Chain Combinations of hucMET27Gv1.3 IgG histidine scanning variant #8 (SEQ ID
NO: 433)
EIVLTQSPATLSLSPGERATLSCRASESVDSYGNSHIHWYQQKPGQAPRLLIYRASNL
EHGIPARFSGSGSGTDFTLTISSLEPEDFAVYYCQQSNEEPLTFGQGTKVELK
>Light Chain Combinations of hucMET27Gv1.3 IgG histidine scanning variant #9 (SEQ ID
NO: 434)
EIVLTQSPATLSLSPGERATLSCRASESVDSYGNSHIHWYQQKPGQAPRLLIYRASNL
ESGIPARFSGSGSGTDFTLTISSLEPEDFAVYYCQQSNEEHLTFGQGTKVELK
>Light Chain Combinations of hucMET27Gv1.3 IgG histidine scanning variant #10 (SEQ ID
NO: 435)
EIVLTQSPATLSLSPGERATLSCRASESVDSYGNSFIHWYQQKPGQAPRLLIYRASNLE
HGIPARFSGSGSGTDFTLTISSLEPEDFAVYYCQQSNEEHLTFGQGTKVELK
>Light Chain Combinations of hucMET27Gv1.3 IgG histidine scanning variant #11 (SEQ ID
NO: 436)
EIVLTQSPATLSLSPGERATLSCRASESHDSYGHSHIHWYQQKPGQAPRLLIYRASNL
ESGIPARFSGSGSGTDFTLTISSLEPEDFAVYYCQQSNEEPLTFGQGTKVELK
>Light Chain Combinations of hucMET27Gv1.3 IgG histidine scanning variant #12 (SEQ ID
NO: 437)
EIVLTQSPATLSLSPGERATLSCRASESHDSYGHSFIHWYQQKPGQAPRLLIYRASNLE
HGIPARFSGSGSGTDFTLTISSLEPEDFAVYYCQQSNEEPLTFGQGTKVELK
>Light Chain Combinations of hucMET27Gv1.3 IgG histidine scanning variant #13 (SEQ ID
NO: 438)
EIVLTQSPATLSLSPGERATLSCRASESHDSYGHSFIHWYQQKPGQAPRLLIYRASNLE
SGIPARFSGSGSGTDFTLTISSLEPEDFAVYYCQQSNEEHLTFGQGTKVELK
>Light Chain Combinations of hucMET27Gv1.3 IgG histidine scanning variant #14 (SEQ ID
NO: 439)
EIVLTQSPATLSLSPGERATLSCRASESHDSYGNSHIHWYQQKPGQAPRLLIYRASNL
EHGIPARFSGSGSGTDFTLTISSLEPEDFAVYYCQQSNEEPLTFGQGTKVELK
>Light Chain Combinations of hucMET27Gv1.3 IgG histidine scanning variant #15 (SEQ ID
NO: 440)
EIVLTQSPATLSLSPGERATLSCRASESHDSYGNSHIHWYQQKPGQAPRLLIYRASNL
ESGIPARFSGSGSGTDFTLTISSLEPEDFAVYYCQQSNEEHLTFGQGTKVELK
>Light Chain Combinations of hucMET27Gv1.3 IgG histidine scanning variant #16 (SEQ ID
NO: 441)
EIVLTQSPATLSLSPGERATLSCRASESHDSYGNSFIHWYQQKPGQAPRLLIYRASNLE
HGIPARFSGSGSGTDFTLTISSLEPEDFAVYYCQQSNEEHLTFGQGTKVELK
>Light Chain Combinations of hucMET27Gv1.3 IgG histidine scanning variant #17 (SEQ ID
NO: 442)
EIVLTQSPATLSLSPGERATLSCRASESVDSYGHSHIHWYQQKPGQAPRLLIYRASNL
EHGIPARFSGSGSGTDFTLTISSLEPEDFAVYYCQQSNEEPLTFGQGTKVELK
>Light Chain Combinations of hucMET27Gv1.3 IgG histidine scanning variant #18 (SEQ ID
NO: 443)
EIVLTQSPATLSLSPGERATLSCRASESVDSYGHSHIHWYQQKPGQAPRLLIYRASNL
ESGIPARFSGSGSGTDFTLTISSLEPEDFAVYYCQQSNEEHLTFGQGTKVELK
>Light Chain Combinations of hucMET27Gv1.3 IgG histidine scanning variant #19 (SEQ ID
NO: 444)
EIVLTQSPATLSLSPGERATLSCRASESVDSYGHSFIHWYQQKPGQAPRLLIYRASNLE
HGIPARFSGSGSGTDFTLTISSLEPEDFAVYYCQQSNEEHLTFGQGTKVELK
>Light Chain Combinations of hucMET27Gv1.3 IgG histidine scanning variant #20 (SEQ ID
NO: 445)
EIVLTQSPATLSLSPGERATLSCRASESVDSYGNSHIHWYQQKPGQAPRLLIYRASNL
EHGIPARFSGSGSGTDFTLTISSLEPEDFAVYYCQQSNEEHLTFGQGTKVELK
>Light Chain Combinations of hucMET27Gv1.3 IgG histidine scanning variant #21 (SEQ ID
NO: 446)
EIVLTQSPATLSLSPGERATLSCRASESHDSHGNSFIHWYQQKPGQAPRLLIYRASNLE
SGIPARFSGSGSGTDFTLTISSLEPEDFAVYYCQQSNEEPLTFGQGTKVELK
>Light Chain Combinations of hucMET27Gv1.3 IgG histidine scanning variant #22 (SEQ ID
NO: 447)
EIVLTQSPATLSLSPGERATLSCRASESVDSHGHSFIHWYQQKPGQAPRLLIYRASNLE
SGIPARFSGSGSGTDFTLTISSLEPEDFAVYYCQQSNEEPLTFGQGTKVELK
>Light Chain Combinations of hucMET27Gv1.3 IgG histidine scanning variant #23 (SEQ ID
NO: 448)
EIVLTQSPATLSLSPGERATLSCRASESVDSHGNSHIHWYQQKPGQAPRLLIYRASNL
ESGIPARFSGSGSGTDFTLTISSLEPEDFAVYYCQQSNEEPLTFGQGTKVELK
>Light Chain Combinations of hucMET27Gv1.3 IgG histidine scanning variant #24 (SEQ ID
NO: 449)
EIVLTQSPATLSLSPGERATLSCRASESVDSHGNSFIHWYQQKPGQAPRLLIYRASNLE
HGIPARFSGSGSGTDFTLTISSLEPEDFAVYYCQQSNEEPLTFGQGTKVELK
>Light Chain Combinations of hucMET27Gv1.3 IgG histidine scanning variant #25 (SEQ ID
NO: 450)
EIVLTQSPATLSLSPGERATLSCRASESVDSHGNSFIHWYQQKPGQAPRLLIYRASNLE
SGIPARFSGSGSGTDFTLTISSLEPEDFAVYYCQQSNEEHLTFGQGTKVELK
>Light Chain Combinations of hucMET27Gv1.3 IgG histidine scanning variant #26 (SEQ ID
NO: 451)
EIVLTQSPATLSLSPGERATLSCRASESHDSYGNSFIHWYQQKPGQAPRLLIYHASNLE
SGIPARFSGSGSGTDFTLTISSLEPEDFAVYYCQQSNEEPLTFGQGTKVELK
>Light Chain Combinations of hucMET27Gv1.3 IgG histidine scanning variant #27 (SEQ ID
NO: 452)
EIVLTQSPATLSLSPGERATLSCRASESVDSYGHSFIHWYQQKPGQAPRLLIYHASNLE
SGIPARFSGSGSGTDFTLTISSLEPEDFAVYYCQQSNEEPLTFGQGTKVELK
>Light Chain Combinations of hucMET27Gv1.3 IgG histidine scanning variant #28 (SEQ ID
NO: 453)
EIVLTQSPATLSLSPGERATLSCRASESVDSYGNSHIHWYQQKPGQAPRLLIYHASNL
ESGIPARFSGSGSGTDFTLTISSLEPEDFAVYYCQQSNEEPLTFGQGTKVELK
>Light Chain Combinations of hucMET27Gv1.3 IgG histidine scanning variant #29 (SEQ ID
NO: 454)
EIVLTQSPATLSLSPGERATLSCRASESVDSYGNSFIHWYQQKPGQAPRLLIYHASNLE
HGIPARFSGSGSGTDFTLTISSLEPEDFAVYYCQQSNEEPLTFGQGTKVELK
>Light Chain Combinations of hucMET27Gv1.3 IgG histidine scanning variant #30 (SEQ ID
NO: 455)
EIVLTQSPATLSLSPGERATLSCRASESVDSYGNSFIHWYQQKPGQAPRLLIYHASNLE
SGIPARFSGSGSGTDFTLTISSLEPEDFAVYYCQQSNEEHLTFGQGTKVELK
>Light Chain Combinations of hucMET27Gv1.3 IgG histidine scanning variant #31 (SEQ ID
NO: 456)
EIVLTQSPATLSLSPGERATLSCRASESVDSHGNSFIHWYQQKPGQAPRLLIYHASNLE
SGIPARFSGSGSGTDFTLTISSLEPEDFAVYYCQQSNEEPLTFGQGTKVELK
>Light Chain Combinations of hucMET27Gv1.3 IgG histidine scanning variant #32 (SEQ ID
NO: 457)
EIVLTQSPATLSLSPGERATLSCRASESHDSHGNSFIHWYQQKPGQAPRLLIYHASNLE
SGIPARFSGSGSGTDFTLTISSLEPEDFAVYYCQQSNEEPLTFGQGTKVELK
>Light Chain Combinations of hucMET27Gv1.3 IgG histidine scanning variant #33 (SEQ ID
NO: 458)
EIVLTQSPATLSLSPGERATLSCRASESVDSHGHSFIHWYQQKPGQAPRLLIYHASNLE
SGIPARFSGSGSGTDFTLTISSLEPEDFAVYYCQQSNEEPLTFGQGTKVELK
>Light Chain Combinations of hucMET27Gv1.3 IgG histidine scanning variant #34 (SEQ ID
NO: 459)
EIVLTQSPATLSLSPGERATLSCRASESVDSHGNSHIHWYQQKPGQAPRLLIYHASNL
ESGIPARFSGSGSGTDFTLTISSLEPEDFAVYYCQQSNEEPLTFGQGTKVELK
>Light Chain Combinations of hucMET27Gv1.3 IgG histidine scanning variant #35 (SEQ ID
NO: 460)
EIVLTQSPATLSLSPGERATLSCRASESVDSHGNSFIHWYQQKPGQAPRLLIYHASNLE
HGIPARFSGSGSGTDFTLTISSLEPEDFAVYYCQQSNEEPLTFGQGTKVELK
>Light Chain Combinations of hucMET27Gv1.3 IgG histidine scanning variant #36 (SEQ ID
NO: 461)
EIVLTQSPATLSLSPGERATLSCRASESVDSHGNSFIHWYQQKPGQAPRLLIYHASNLE
SGIPARFSGSGSGTDFTLTISSLEPEDFAVYYCQQSNEEHLTFGQGTKVELK
>Light Chain Combinations of hucMET27Gv1.3 IgG histidine scanning variant #37 (SEQ ID
NO: 462)
EIVLTQSPATLSLSPGERATLSCRASESHDSHGHSFIHWYQQKPGQAPRLLIYRASNLE
SGIPARFSGSGSGTDFTLTISSLEPEDFAVYYCQQSNEEPLTFGQGTKVELK
>Light Chain Combinations of hucMET27Gv1.3 IgG histidine scanning variant #38 (SEQ ID
NO: 463)
EIVLTQSPATLSLSPGERATLSCRASESHDSHGNSHIHWYQQKPGQAPRLLIYRASNL
ESGIPARFSGSGSGTDFTLTISSLEPEDFAVYYCQQSNEEPLTFGQGTKVELK
>Light Chain Combinations of hucMET27Gv1.3 IgG histidine scanning variant #39 (SEQ ID
NO: 464)
EIVLTQSPATLSLSPGERATLSCRASESHDSHGNSFIHWYQQKPGQAPRLLIYRASNLE
HGIPARFSGSGSGTDFTLTISSLEPEDFAVYYCQQSNEEPLTFGQGTKVELK
>Light Chain Combinations of hucMET27Gv1.3 IgG histidine scanning variant #40 (SEQ ID
NO: 465)
EIVLTQSPATLSLSPGERATLSCRASESHDSHGNSFIHWYQQKPGQAPRLLIYRASNLE
SGIPARFSGSGSGTDFTLTISSLEPEDFAVYYCQQSNEEHLTFGQGTKVELK
>Light Chain Combinations of hucMET27Gv1.3 IgG histidine scanning variant #41 (SEQ ID
NO: 466)
EIVLTQSPATLSLSPGERATLSCRASESVDSHGHSHIHWYQQKPGQAPRLLIYRASNL
ESGIPARFSGSGSGTDFTLTISSLEPEDFAVYYCQQSNEEPLTFGQGTKVELK
>Light Chain Combinations of hucMET27Gv1.3 IgG histidine scanning variant #42 (SEQ ID
NO: 467)
EIVLTQSPATLSLSPGERATLSCRASESVDSHGHSFIHWYQQKPGQAPRLLIYRASNLE
HGIPARFSGSGSGTDFTLTISSLEPEDFAVYYCQQSNEEPLTFGQGTKVELK
>Light Chain Combinations of hucMET27Gv1.3 IgG histidine scanning variant #43 (SEQ ID
NO: 468)
EIVLTQSPATLSLSPGERATLSCRASESVDSHGHSFIHWYQQKPGQAPRLLIYRASNLE
SGIPARFSGSGSGTDFTLTISSLEPEDFAVYYCQQSNEEHLTFGQGTKVELK
>Light Chain Combinations of hucMET27Gv1.3 IgG histidine scanning variant #44 (SEQ ID
NO: 469)
EIVLTQSPATLSLSPGERATLSCRASESVDSHGNSHIHWYQQKPGQAPRLLIYRASNL
EHGIPARFSGSGSGTDFTLTISSLEPEDFAVYYCQQSNEEPLTFGQGTKVELK
>Light Chain Combinations of hucMET27Gv1.3 IgG histidine scanning variant #45 (SEQ ID
NO: 470)
EIVLTQSPATLSLSPGERATLSCRASESVDSHGNSHIHWYQQKPGQAPRLLIYRASNL
ESGIPARFSGSGSGTDFTLTISSLEPEDFAVYYCQQSNEEHLTFGQGTKVELK
>Light Chain Combinations of hucMET27Gv1.3 IgG histidine scanning variant #46 (SEQ ID
NO: 471)
EIVLTQSPATLSLSPGERATLSCRASESVDSHGNSFIHWYQQKPGQAPRLLIYRASNLE
HGIPARFSGSGSGTDFTLTISSLEPEDFAVYYCQQSNEEHLTFGQGTKVELK
>Light Chain Combinations of hucMET27Gv1.3 IgG histidine scanning variant #47 (SEQ ID
NO: 472)
EIVLTQSPATLSLSPGERATLSCRASESHDSHGHSHIHWYQQKPGQAPRLLIYRASNL
ESGIPARFSGSGSGTDFTLTISSLEPEDFAVYYCQQSNEEPLTFGQGTKVELK
>Light Chain Combinations of hucMET27Gv1.3 IgG histidine scanning variant #48 (SEQ ID
NO: 473)
EIVLTQSPATLSLSPGERATLSCRASESHDSHGHSFIHWYQQKPGQAPRLLIYRASNLE
HGIPARFSGSGSGTDFTLTISSLEPEDFAVYYCQQSNEEPLTFGQGTKVELK
>Light Chain Combinations of hucMET27Gv1.3 IgG histidine scanning variant #49 (SEQ ID
NO: 474)
EIVLTQSPATLSLSPGERATLSCRASESHDSHGHSFIHWYQQKPGQAPRLLIYRASNLE
SGIPARFSGSGSGTDFTLTISSLEPEDFAVYYCQQSNEEHLTFGQGTKVELK
>Light Chain Combinations of hucMET27Gv1.3 IgG histidine scanning variant #50 (SEQ ID
NO: 475)
EIVLTQSPATLSLSPGERATLSCRASESHDSHGNSHIHWYQQKPGQAPRLLIYRASNL
EHGIPARFSGSGSGTDFTLTISSLEPEDFAVYYCQQSNEEPLTFGQGTKVELK
>Light Chain Combinations of hucMET27Gv1.3 IgG histidine scanning variant #51 (SEQ ID
NO: 476)
EIVLTQSPATLSLSPGERATLSCRASESHDSHGNSHIHWYQQKPGQAPRLLIYRASNL
ESGIPARFSGSGSGTDFTLTISSLEPEDFAVYYCQQSNEEHLTFGQGTKVELK
>Light Chain Combinations of hucMET27Gv1.3 IgG histidine scanning variant #52 (SEQ ID
NO: 477)
EIVLTQSPATLSLSPGERATLSCRASESHDSHGNSFIHWYQQKPGQAPRLLIYRASNLE
HGIPARFSGSGSGTDFTLTISSLEPEDFAVYYCQQSNEEHLTFGQGTKVELK
>Light Chain Combinations of hucMET27Gv1.3 IgG histidine scanning variant #53 (SEQ ID
NO: 478)
EIVLTQSPATLSLSPGERATLSCRASESVDSHGHSHIHWYQQKPGQAPRLLIYRASNL
EHGIPARFSGSGSGTDFTLTISSLEPEDFAVYYCQQSNEEPLTFGQGTKVELK
>Light Chain Combinations of hucMET27Gv1.3 IgG histidine scanning variant #54 (SEQ ID
NO: 479)
EIVLTQSPATLSLSPGERATLSCRASESVDSHGHSHIHWYQQKPGQAPRLLIYRASNL
ESGIPARFSGSGSGTDFTLTISSLEPEDFAVYYCQQSNEEHLTFGQGTKVELK
>Light Chain Combinations of hucMET27Gv1.3 IgG histidine scanning variant #55 (SEQ ID
NO: 480)
EIVLTQSPATLSLSPGERATLSCRASESVDSHGHSFIHWYQQKPGQAPRLLIYRASNLE
HGIPARFSGSGSGTDFTLTISSLEPEDFAVYYCQQSNEEHLTFGQGTKVELK
>Light Chain Combinations of hucMET27Gv1.3 IgG histidine scanning variant #56 (SEQ ID
NO: 481)
EIVLTQSPATLSLSPGERATLSCRASESVDSHGNSHIHWYQQKPGQAPRLLIYRASNL
EHGIPARFSGSGSGTDFTLTISSLEPEDFAVYYCQQSNEEHLTFGQGTKVELK
>Light Chain Combinations of hucMET27Gv1.3 IgG histidine scanning variant #57 (SEQ ID
NO: 482)
EIVLTQSPATLSLSPGERATLSCRASESHDSYGHSFIHWYQQKPGQAPRLLIYHASNLE
SGIPARFSGSGSGTDFTLTISSLEPEDFAVYYCQQSNEEPLTFGQGTKVELK
>Light Chain Combinations of hucMET27Gv1.3 IgG histidine scanning variant #58 (SEQ ID
NO: 483)
EIVLTQSPATLSLSPGERATLSCRASESHDSYGNSHIHWYQQKPGQAPRLLIYHASNL
ESGIPARFSGSGSGTDFTLTISSLEPEDFAVYYCQQSNEEPLTFGQGTKVELK
>Light Chain Combinations of hucMET27Gv1.3 IgG histidine scanning variant #59 (SEQ ID
NO: 484)
EIVLTQSPATLSLSPGERATLSCRASESHDSYGNSFIHWYQQKPGQAPRLLIYHASNLE
HGIPARFSGSGSGTDFTLTISSLEPEDFAVYYCQQSNEEPLTFGQGTKVELK
>Light Chain Combinations of hucMET27Gv1.3 IgG histidine scanning variant #60 (SEQ ID
NO: 485)
EIVLTQSPATLSLSPGERATLSCRASESHDSYGNSFIHWYQQKPGQAPRLLIYHASNLE
SGIPARFSGSGSGTDFTLTISSLEPEDFAVYYCQQSNEEHLTFGQGTKVELK
>Light Chain Combinations of hucMET27Gv1.3 IgG histidine scanning variant #61 (SEQ ID
NO: 486)
EIVLTQSPATLSLSPGERATLSCRASESVDSYGHSHIHWYQQKPGQAPRLLIYHASNL
ESGIPARFSGSGSGTDFTLTISSLEPEDFAVYYCQQSNEEPLTFGQGTKVELK
>Light Chain Combinations of hucMET27Gv1.3 IgG histidine scanning variant #62 (SEQ ID
NO: 487)
EIVLTQSPATLSLSPGERATLSCRASESVDSYGHSFIHWYQQKPGQAPRLLIYHASNLE
HGIPARFSGSGSGTDFTLTISSLEPEDFAVYYCQQSNEEPLTFGQGTKVELK
>Light Chain Combinations of hucMET27Gv1.3 IgG histidine scanning variant #63 (SEQ ID
NO: 488)
EIVLTQSPATLSLSPGERATLSCRASESVDSYGHSFIHWYQQKPGQAPRLLIYHASNLE
SGIPARFSGSGSGTDFTLTISSLEPEDFAVYYCQQSNEEHLTFGQGTKVELK
>Light Chain Combinations of hucMET27Gv1.3 IgG histidine scanning variant #64 (SEQ ID
NO: 489)
EIVLTQSPATLSLSPGERATLSCRASESVDSYGNSHIHWYQQKPGQAPRLLIYHASNL
EHGIPARFSGSGSGTDFTLTISSLEPEDFAVYYCQQSNEEPLTFGQGTKVELK
>Light Chain Combinations of hucMET27Gv1.3 IgG histidine scanning variant #65 (SEQ ID
NO: 490)
EIVLTQSPATLSLSPGERATLSCRASESVDSYGNSHIHWYQQKPGQAPRLLIYHASNL
ESGIPARFSGSGSGTDFTLTISSLEPEDFAVYYCQQSNEEHLTFGQGTKVELK
>Light Chain Combinations of hucMET27Gv1.3 IgG histidine scanning variant #66 (SEQ ID
NO: 491)
EIVLTQSPATLSLSPGERATLSCRASESVDSYGNSFIHWYQQKPGQAPRLLIYHASNLE
HGIPARFSGSGSGTDFTLTISSLEPEDFAVYYCQQSNEEHLTFGQGTKVELK
>Light Chain Combinations of hucMET27Gv1.3 IgG histidine scanning variant #67 (SEQ ID
NO: 492)
EIVLTQSPATLSLSPGERATLSCRASESHDSYGHSHIHWYQQKPGQAPRLLIYHASNL
ESGIPARFSGSGSGTDFTLTISSLEPEDFAVYYCQQSNEEPLTFGQGTKVELK
>Light Chain Combinations of hucMET27Gv1.3 IgG histidine scanning variant #68 (SEQ ID
NO: 493)
EIVLTQSPATLSLSPGERATLSCRASESHDSYGHSFIHWYQQKPGQAPRLLIYHASNLE
HGIPARFSGSGSGTDFTLTISSLEPEDFAVYYCQQSNEEPLTFGQGTKVELK
>Light Chain Combinations of hucMET27Gv1.3 IgG histidine scanning variant #69 (SEQ ID
NO: 494)
EIVLTQSPATLSLSPGERATLSCRASESHDSYGHSFIHWYQQKPGQAPRLLIYHASNLE
SGIPARFSGSGSGTDFTLTISSLEPEDFAVYYCQQSNEEHLTFGQGTKVELK
>Light Chain Combinations of hucMET27Gv1.3 IgG histidine scanning variant #70 (SEQ ID
NO: 495)
EIVLTQSPATLSLSPGERATLSCRASESHDSYGNSHIHWYQQKPGQAPRLLIYHASNL
EHGIPARFSGSGSGTDFTLTISSLEPEDFAVYYCQQSNEEPLTFGQGTKVELK
>Light Chain Combinations of hucMET27Gv1.3 IgG histidine scanning variant #71 (SEQ ID
NO: 496)
EIVLTQSPATLSLSPGERATLSCRASESHDSYGNSHIHWYQQKPGQAPRLLIYHASNL
ESGIPARFSGSGSGTDFTLTISSLEPEDFAVYYCQQSNEEHLTFGQGTKVELK
>Light Chain Combinations of hucMET27Gv1.3 IgG histidine scanning variant #72 (SEQ ID
NO: 497)
EIVLTQSPATLSLSPGERATLSCRASESHDSYGNSFIHWYQQKPGQAPRLLIYHASNLE
HGIPARFSGSGSGTDFTLTISSLEPEDFAVYYCQQSNEEHLTFGQGTKVELK
>Light Chain Combinations of hucMET27Gv1.3 IgG histidine scanning variant #73 (SEQ ID
NO: 498)
EIVLTQSPATLSLSPGERATLSCRASESVDSYGHSHIHWYQQKPGQAPRLLIYHASNL
EHGIPARFSGSGSGTDFTLTISSLEPEDFAVYYCQQSNEEPLTFGQGTKVELK
>Light Chain Combinations of hucMET27Gv1.3 IgG histidine scanning variant #74 (SEQ ID
NO: 499)
EIVLTQSPATLSLSPGERATLSCRASESVDSYGHSHIHWYQQKPGQAPRLLIYHASNL
ESGIPARFSGSGSGTDFTLTISSLEPEDFAVYYCQQSNEEHLTFGQGTKVELK
>Light Chain Combinations of hucMET27Gv1.3 IgG histidine scanning variant #75 (SEQ ID
NO: 500)
EIVLTQSPATLSLSPGERATLSCRASESVDSYGHSFIHWYQQKPGQAPRLLIYHASNLE
HGIPARFSGSGSGTDFTLTISSLEPEDFAVYYCQQSNEEHLTFGQGTKVELK
>Light Chain Combinations of hucMET27Gv1.3 IgG histidine scanning variant #76 (SEQ ID
NO: 501)
EIVLTQSPATLSLSPGERATLSCRASESVDSYGNSHIHWYQQKPGQAPRLLIYHASNL
EHGIPARFSGSGSGTDFTLTISSLEPEDFAVYYCQQSNEEHLTFGQGTKVELK
>Heavy Chain of P3D12 IgG (SEQ ID NO: 502)
QVQLVQSGAEVKKPGASVKVSCKASGYTFTSYWMHWVKQAPGQGLDWIGYIKPST
DNTEYNQKFKDKATLTADKSTSTAYMELSSLRSEDTAVYYCARSYGNYPLMDYWG
QGTTVTVSS
>Light Chain of P3D12 IgG (SEQ ID NO: 503)
QIVLTQSPAILSLSPGERATLSCSASSSVTSNYLYWYQQKPGSSPKLLIYSTSNLASGV
PARFSGSGSGTSYTLTISSLEAEDAASYFCHQWSSYPPTFGSGTKLEIK
>Heavy Chain CDR1 of P3D12 (SEQ ID NO: 504)
GYTFTSYWMH
>Heavy Chain CDR2 of P3D12 (SEQ ID NO: 505)
YIKPSTDNTEYNQKFKD
>Heavy Chain CDR3 of P3D12 (SEQ ID NO: 506)
ARSYGNYPLMDY
>Light Chain CDR1 of P3D12 (SEQ ID NO: 507)
SASSSVTSNYLY
>Light Chain CDR2 of P3D12 (SEQ ID NO: 508)
STSNLAS
>Light Chain CDR3 of P3D12 (SEQ ID NO: 509)
HQWSSYPPT
>Heavy Chain of P3D12 IgG histidine scanning variant #1 (SEQ ID NO: 510)
QVQLVQSGAEVKKPGASVKVSCKASHYTFTSYWMHWVKQAPGQGLDWIGYIKPST
DNTEYNQKFKDKATLTADKSTSTAYMELSSLRSEDTAVYYCARSYGNYPLMDYWG
QGTTVTVSS
>Heavy Chain of P3D12 IgG histidine scanning variant #2 (SEQ ID NO: 511)
QVQLVQSGAEVKKPGASVKVSCKASGHTFTSYWMHWVKQAPGQGLDWIGYIKPST
DNTEYNQKFKDKATLTADKSTSTAYMELSSLRSEDTAVYYCARSYGNYPLMDYWG
QGTTVTVSS
>Heavy Chain of P3D12 IgG histidine scanning variant #3 (SEQ ID NO: 512)
QVQLVQSGAEVKKPGASVKVSCKASGYHFTSYWMHWVKQAPGQGLDWIGYIKPST
DNTEYNQKFKDKATLTADKSTSTAYMELSSLRSEDTAVYYCARSYGNYPLMDYWG
QGTTVTVSS
>Heavy Chain of P3D12 IgG histidine scanning variant #4 (SEQ ID NO: 513)
QVQLVQSGAEVKKPGASVKVSCKASGYTHTSYWMHWVKQAPGQGLDWIGYIKPST
DNTEYNQKFKDKATLTADKSTSTAYMELSSLRSEDTAVYYCARSYGNYPLMDYWG
QGTTVTVSS
>Heavy Chain of P3D12 IgG histidine scanning variant #5 (SEQ ID NO: 514)
QVQLVQSGAEVKKPGASVKVSCKASGYTFHSYWMHWVKQAPGQGLDWIGYIKPST
DNTEYNQKFKDKATLTADKSTSTAYMELSSLRSEDTAVYYCARSYGNYPLMDYWG
QGTTVTVSS
>Heavy Chain of P3D12 IgG histidine scanning variant #6 (SEQ ID NO: 515)
QVQLVQSGAEVKKPGASVKVSCKASGYTFTHYWMHWVKQAPGQGLDWIGYIKPST
DNTEYNQKFKDKATLTADKSTSTAYMELSSLRSEDTAVYYCARSYGNYPLMDYWG
QGTTVTVSS
>Heavy Chain of P3D12 IgG histidine scanning variant #7 (SEQ ID NO: 516)
QVQLVQSGAEVKKPGASVKVSCKASGYTFTSHWMHWVKQAPGQGLDWIGYIKPST
DNTEYNQKFKDKATLTADKSTSTAYMELSSLRSEDTAVYYCARSYGNYPLMDYWG
QGTTVTVSS
>Heavy Chain of P3D12 IgG histidine scanning variant #8 (SEQ ID NO: 517)
QVQLVQSGAEVKKPGASVKVSCKASGYTFTSYHMHWVKQAPGQGLDWIGYIKPST
DNTEYNQKFKDKATLTADKSTSTAYMELSSLRSEDTAVYYCARSYGNYPLMDYWG
QGTTVTVSS
>Heavy Chain of P3D12 IgG histidine scanning variant #9 (SEQ ID NO: 518)
QVQLVQSGAEVKKPGASVKVSCKASGYTFTSYWHHWVKQAPGQGLDWIGYIKPST
DNTEYNQKFKDKATLTADKSTSTAYMELSSLRSEDTAVYYCARSYGNYPLMDYWG
QGTTVTVSS
>Heavy Chain of P3D12 IgG histidine scanning variant #10 (SEQ ID NO: 519)
QVQLVQSGAEVKKPGASVKVSCKASGYTFTSYWMAWVKQAPGQGLDWIGYIKPST
DNTEYNQKFKDKATLTADKSTSTAYMELSSLRSEDTAVYYCARSYGNYPLMDYWG
QGTTVTVSS
>Heavy Chain of P3D12 IgG histidine scanning variant #11 (SEQ ID NO: 520)
QVQLVQSGAEVKKPGASVKVSCKASGYTFTSYWMHWVKQAPGQGLDWIGHIKPST
DNTEYNQKFKDKATLTADKSTSTAYMELSSLRSEDTAVYYCARSYGNYPLMDYWG
QGTTVTVSS
>Heavy Chain of P3D12 IgG histidine scanning variant #12 (SEQ ID NO: 521)
QVQLVQSGAEVKKPGASVKVSCKASGYTFTSYWMHWVKQAPGQGLDWIGYHKPS
TDNTEYNQKFKDKATLTADKSTSTAYMELSSLRSEDTAVYYCARSYGNYPLMDYW
GQGTTVTVSS
>Heavy Chain of P3D12 IgG histidine scanning variant #13 (SEQ ID NO: 522)
QVQLVQSGAEVKKPGASVKVSCKASGYTFTSYWMHWVKQAPGQGLDWIGYIHPST
DNTEYNQKFKDKATLTADKSTSTAYMELSSLRSEDTAVYYCARSYGNYPLMDYWG
QGTTVTVSS
>Heavy Chain of P3D12 IgG histidine scanning variant #14 (SEQ ID NO: 523)
QVQLVQSGAEVKKPGASVKVSCKASGYTFTSYWMHWVKQAPGQGLDWIGYIKHST
DNTEYNQKFKDKATLTADKSTSTAYMELSSLRSEDTAVYYCARSYGNYPLMDYWG
QGTTVTVSS
>Heavy Chain of P3D12 IgG histidine scanning variant #15 (SEQ ID NO: 524)
QVQLVQSGAEVKKPGASVKVSCKASGYTFTSYWMHWVKQAPGQGLDWIGYIKPHT
DNTEYNQKFKDKATLTADKSTSTAYMELSSLRSEDTAVYYCARSYGNYPLMDYWG
QGTTVTVSS
>Heavy Chain of P3D12 IgG histidine scanning variant #16 (SEQ ID NO: 525)
QVQLVQSGAEVKKPGASVKVSCKASGYTFTSYWMHWVKQAPGQGLDWIGYIKPSH
DNTEYNQKFKDKATLTADKSTSTAYMELSSLRSEDTAVYYCARSYGNYPLMDYWG
QGTTVTVSS
>Heavy Chain of P3D12 IgG histidine scanning variant #17 (SEQ ID NO: 526)
QVQLVQSGAEVKKPGASVKVSCKASGYTFTSYWMHWVKQAPGQGLDWIGYIKPST
HNTEYNQKFKDKATLTADKSTSTAYMELSSLRSEDTAVYYCARSYGNYPLMDYWG
QGTTVTVSS
>Heavy Chain of P3D12 IgG histidine scanning variant #18 (SEQ ID NO: 527)
QVQLVQSGAEVKKPGASVKVSCKASGYTFTSYWMHWVKQAPGQGLDWIGYIKPST
DHTEYNQKFKDKATLTADKSTSTAYMELSSLRSEDTAVYYCARSYGNYPLMDYWG
QGTTVTVSS
>Heavy Chain of P3D12 IgG histidine scanning variant #19 (SEQ ID NO: 528)
QVQLVQSGAEVKKPGASVKVSCKASGYTFTSYWMHWVKQAPGQGLDWIGYIKPST
DNHEYNQKFKDKATLTADKSTSTAYMELSSLRSEDTAVYYCARSYGNYPLMDYWG
QGTTVTVSS
>Heavy Chain of P3D12 IgG histidine scanning variant #20 (SEQ ID NO: 529)
QVQLVQSGAEVKKPGASVKVSCKASGYTFTSYWMHWVKQAPGQGLDWIGYIKPST
DNTHYNQKFKDKATLTADKSTSTAYMELSSLRSEDTAVYYCARSYGNYPLMDYWG
QGTTVTVSS
>Heavy Chain of P3D12 IgG histidine scanning variant #21 (SEQ ID NO: 530)
QVQLVQSGAEVKKPGASVKVSCKASGYTFTSYWMHWVKQAPGQGLDWIGYIKPST
DNTEHNQKFKDKATLTADKSTSTAYMELSSLRSEDTAVYYCARSYGNYPLMDYWG
QGTTVTVSS
>Heavy Chain of P3D12 IgG histidine scanning variant #22 (SEQ ID NO: 531)
QVQLVQSGAEVKKPGASVKVSCKASGYTFTSYWMHWVKQAPGQGLDWIGYIKPST
DNTEYHQKFKDKATLTADKSTSTAYMELSSLRSEDTAVYYCARSYGNYPLMDYWG
QGTTVTVSS
>Heavy Chain of P3D12 IgG histidine scanning variant #23 (SEQ ID NO: 532)
QVQLVQSGAEVKKPGASVKVSCKASGYTFTSYWMHWVKQAPGQGLDWIGYIKPST
DNTEYNHKFKDKATLTADKSTSTAYMELSSLRSEDTAVYYCARSYGNYPLMDYWG
QGTTVTVSS
>Heavy Chain of P3D12 IgG histidine scanning variant #24 (SEQ ID NO: 533)
QVQLVQSGAEVKKPGASVKVSCKASGYTFTSYWMHWVKQAPGQGLDWIGYIKPST
DNTEYNQHFKDKATLTADKSTSTAYMELSSLRSEDTAVYYCARSYGNYPLMDYWG
QGTTVTVSS
>Heavy Chain of P3D12 IgG histidine scanning variant #25 (SEQ ID NO: 534)
QVQLVQSGAEVKKPGASVKVSCKASGYTFTSYWMHWVKQAPGQGLDWIGYIKPST
DNTEYNQKHKDKATLTADKSTSTAYMELSSLRSEDTAVYYCARSYGNYPLMDYWG
QGTTVTVSS
>Heavy Chain of P3D12 IgG histidine scanning variant #26 (SEQ ID NO: 535)
QVQLVQSGAEVKKPGASVKVSCKASGYTFTSYWMHWVKQAPGQGLDWIGYIKPST
DNTEYNQKFHDKATLTADKSTSTAYMELSSLRSEDTAVYYCARSYGNYPLMDYWG
QGTTVTVSS
>Heavy Chain of P3D12 IgG histidine scanning variant #27 (SEQ ID NO: 536)
QVQLVQSGAEVKKPGASVKVSCKASGYTFTSYWMHWVKQAPGQGLDWIGYIKPST
DNTEYNQKFKHKATLTADKSTSTAYMELSSLRSEDTAVYYCARSYGNYPLMDYWG
QGTTVTVSS
>Heavy Chain of P3D12 IgG histidine scanning variant #28 (SEQ ID NO: 537)
QVQLVQSGAEVKKPGASVKVSCKASGYTFTSYWMHWVKQAPGQGLDWIGYIKPST
DNTEYNQKFKDKATLTADKSTSTAYMELSSLRSEDTAVYYCHRSYGNYPLMDYWG
QGTTVTVSS
>Heavy Chain of P3D12 IgG histidine scanning variant #29 (SEQ ID NO: 538)
QVQLVQSGAEVKKPGASVKVSCKASGYTFTSYWMHWVKQAPGQGLDWIGYIKPST
DNTEYNQKFKDKATLTADKSTSTAYMELSSLRSEDTAVYYCAHSYGNYPLMDYWG
QGTTVTVSS
>Heavy Chain of P3D12 IgG histidine scanning variant #30 (SEQ ID NO: 539)
QVQLVQSGAEVKKPGASVKVSCKASGYTFTSYWMHWVKQAPGQGLDWIGYIKPST
DNTEYNQKFKDKATLTADKSTSTAYMELSSLRSEDTAVYYCARHYGNYPLMDYWG
QGTTVTVSS
>Heavy Chain of P3D12 IgG histidine scanning variant #31 (SEQ ID NO: 540)
QVQLVQSGAEVKKPGASVKVSCKASGYTFTSYWMHWVKQAPGQGLDWIGYIKPST
DNTEYNQKFKDKATLTADKSTSTAYMELSSLRSEDTAVYYCARSHGNYPLMDYWG
QGTTVTVSS
>Heavy Chain of P3D12 IgG histidine scanning variant #32 (SEQ ID NO: 541)
QVQLVQSGAEVKKPGASVKVSCKASGYTFTSYWMHWVKQAPGQGLDWIGYIKPST
DNTEYNQKFKDKATLTADKSTSTAYMELSSLRSEDTAVYYCARSYHNYPLMDYWG
QGTTVTVSS
>Heavy Chain of P3D12 IgG histidine scanning variant #33 (SEQ ID NO: 542)
QVQLVQSGAEVKKPGASVKVSCKASGYTFTSYWMHWVKQAPGQGLDWIGYIKPST
DNTEYNQKFKDKATLTADKSTSTAYMELSSLRSEDTAVYYCARSYGHYPLMDYWG
QGTTVTVSS
>Heavy Chain of P3D12 IgG histidine scanning variant #34 (SEQ ID NO: 543)
QVQLVQSGAEVKKPGASVKVSCKASGYTFTSYWMHWVKQAPGQGLDWIGYIKPST
DNTEYNQKFKDKATLTADKSTSTAYMELSSLRSEDTAVYYCARSYGNHPLMDYWG
QGTTVTVSS
>Heavy Chain of P3D12 IgG histidine scanning variant #35 (SEQ ID NO: 544)
QVQLVQSGAEVKKPGASVKVSCKASGYTFTSYWMHWVKQAPGQGLDWIGYIKPST
DNTEYNQKFKDKATLTADKSTSTAYMELSSLRSEDTAVYYCARSYGNYHLMDYWG
QGTTVTVSS
>Heavy Chain of P3D12 IgG histidine scanning variant #36 (SEQ ID NO: 545)
QVQLVQSGAEVKKPGASVKVSCKASGYTFTSYWMHWVKQAPGQGLDWIGYIKPST
DNTEYNQKFKDKATLTADKSTSTAYMELSSLRSEDTAVYYCARSYGNYPHMDYWG
QGTTVTVSS
>Heavy Chain of P3D12 IgG histidine scanning variant #37 (SEQ ID NO: 546)
QVQLVQSGAEVKKPGASVKVSCKASGYTFTSYWMHWVKQAPGQGLDWIGYIKPST
DNTEYNQKFKDKATLTADKSTSTAYMELSSLRSEDTAVYYCARSYGNYPLHDYWG
QGTTVTVSS
>Heavy Chain of P3D12 IgG histidine scanning variant #38 (SEQ ID NO: 547)
QVQLVQSGAEVKKPGASVKVSCKASGYTFTSYWMHWVKQAPGQGLDWIGYIKPST
DNTEYNQKFKDKATLTADKSTSTAYMELSSLRSEDTAVYYCARSYGNYPLMHYWG
QGTTVTVSS
>Heavy Chain of P3D12 IgG histidine scanning variant #39 (SEQ ID NO: 548)
QVQLVQSGAEVKKPGASVKVSCKASGYTFTSYWMHWVKQAPGQGLDWIGYIKPST
DNTEYNQKFKDKATLTADKSTSTAYMELSSLRSEDTAVYYCARSYGNYPLMDHWG
QGTTVTVSS
>Light Chain of P3D12 IgG histidine scanning variant #1 (SEQ ID NO: 549)
QIVLTQSPAILSLSPGERATLSCHASSSVTSNYLYWYQQKPGSSPKLLIYSTSNLASGV
PARFSGSGSGTSYTLTISSLEAEDAASYFCHQWSSYPPTFGSGTKLEIK
>Light Chain of P3D12 IgG histidine scanning variant #2 (SEQ ID NO: 550)
QIVLTQSPAILSLSPGERATLSCSHSSSVTSNYLYWYQQKPGSSPKLLIYSTSNLASGV
PARFSGSGSGTSYTLTISSLEAEDAASYFCHQWSSYPPTFGSGTKLEIK
>Light Chain of P3D12 IgG histidine scanning variant #3 (SEQ ID NO: 551)
QIVLTQSPAILSLSPGERATLSCSAHSSVTSNYLYWYQQKPGSSPKLLIYSTSNLASGV
PARFSGSGSGTSYTLTISSLEAEDAASYFCHQWSSYPPTFGSGTKLEIK
>Light Chain of P3D12 IgG histidine scanning variant #4 (SEQ ID NO: 552)
QIVLTQSPAILSLSPGERATLSCSASHSVTSNYLYWYQQKPGSSPKLLIYSTSNLASGV
PARFSGSGSGTSYTLTISSLEAEDAASYFCHQWSSYPPTFGSGTKLEIK
>Light Chain of P3D12 IgG histidine scanning variant #5 (SEQ ID NO: 553)
QIVLTQSPAILSLSPGERATLSCSASSHVTSNYLYWYQQKPGSSPKLLIYSTSNLASGV
PARFSGSGSGTSYTLTISSLEAEDAASYFCHQWSSYPPTFGSGTKLEIK
>Light Chain of P3D12 IgG histidine scanning variant #6 (SEQ ID NO: 554)
QIVLTQSPAILSLSPGERATLSCSASSSHTSNYLYWYQQKPGSSPKLLIYSTSNLASGV
PARFSGSGSGTSYTLTISSLEAEDAASYFCHQWSSYPPTFGSGTKLEIK
>Light Chain of P3D12 IgG histidine scanning variant #7 (SEQ ID NO: 555)
QIVLTQSPAILSLSPGERATLSCSASSSVHSNYLYWYQQKPGSSPKLLIYSTSNLASGV
PARFSGSGSGTSYTLTISSLEAEDAASYFCHQWSSYPPTFGSGTKLEIK
>Light Chain of P3D12 IgG histidine scanning variant #8 (SEQ ID NO: 556)
QIVLTQSPAILSLSPGERATLSCSASSSVTHNYLYWYQQKPGSSPKLLIYSTSNLASGV
PARFSGSGSGTSYTLTISSLEAEDAASYFCHQWSSYPPTFGSGTKLEIK
>Light Chain of P3D12 IgG histidine scanning variant #9 (SEQ ID NO: 557)
QIVLTQSPAILSLSPGERATLSCSASSSVTSHYLYWYQQKPGSSPKLLIYSTSNLASGV
PARFSGSGSGTSYTLTISSLEAEDAASYFCHQWSSYPPTFGSGTKLEIK
>Light Chain of P3D12 IgG histidine scanning variant #10 (SEQ ID NO: 558)
QIVLTQSPAILSLSPGERATLSCSASSSVTSNHLYWYQQKPGSSPKLLIYSTSNLASGV
PARFSGSGSGTSYTLTISSLEAEDAASYFCHQWSSYPPTFGSGTKLEIK
>Light Chain of P3D12 IgG histidine scanning variant #11 (SEQ ID NO: 559)
QIVLTQSPAILSLSPGERATLSCSASSSVTSNYHYWYQQKPGSSPKLLIYSTSNLASGV
PARFSGSGSGTSYTLTISSLEAEDAASYFCHQWSSYPPTFGSGTKLEIK
>Light Chain of P3D12 IgG histidine scanning variant #12 (SEQ ID NO: 560)
QIVLTQSPAILSLSPGERATLSCSASSSVTSNYLHWYQQKPGSSPKLLIYSTSNLASGV
PARFSGSGSGTSYTLTISSLEAEDAASYFCHQWSSYPPTFGSGTKLEIK
>Light Chain of P3D12 IgG histidine scanning variant #13 (SEQ ID NO: 561)
QIVLTQSPAILSLSPGERATLSCSASSSVTSNYLYWYQQKPGSSPKLLIYHTSNLASGV
PARFSGSGSGTSYTLTISSLEAEDAASYFCHQWSSYPPTFGSGTKLEIK
>Light Chain of P3D12 IgG histidine scanning variant #14 (SEQ ID NO: 562)
QIVLTQSPAILSLSPGERATLSCSASSSVTSNYLYWYQQKPGSSPKLLIYSHSNLASGV
PARFSGSGSGTSYTLTISSLEAEDAASYFCHQWSSYPPTFGSGTKLEIK
>Light Chain of P3D12 IgG histidine scanning variant #15 (SEQ ID NO: 563)
QIVLTQSPAILSLSPGERATLSCSASSSVTSNYLYWYQQKPGSSPKLLIYSTHNLASGV
PARFSGSGSGTSYTLTISSLEAEDAASYFCHQWSSYPPTFGSGTKLEIK
>Light Chain of P3D12 IgG histidine scanning variant #16 (SEQ ID NO: 564)
QIVLTQSPAILSLSPGERATLSCSASSSVTSNYLYWYQQKPGSSPKLLIYSTSHLASGV
PARFSGSGSGTSYTLTISSLEAEDAASYFCHQWSSYPPTFGSGTKLEIK
>Light Chain of P3D12 IgG histidine scanning variant #17 (SEQ ID NO: 565)
QIVLTQSPAILSLSPGERATLSCSASSSVTSNYLYWYQQKPGSSPKLLIYSTSNHASGV
PARFSGSGSGTSYTLTISSLEAEDAASYFCHQWSSYPPTFGSGTKLEIK
>Light Chain of P3D12 IgG histidine scanning variant #18 (SEQ ID NO: 566)
QIVLTQSPAILSLSPGERATLSCSASSSVTSNYLYWYQQKPGSSPKLLIYSTSNLHSGV
PARFSGSGSGTSYTLTISSLEAEDAASYFCHQWSSYPPTFGSGTKLEIK
>Light Chain of P3D12 IgG histidine scanning variant #19 (SEQ ID NO: 567)
QIVLTQSPAILSLSPGERATLSCSASSSVTSNYLYWYQQKPGSSPKLLIYSTSNLAHGV
PARFSGSGSGTSYTLTISSLEAEDAASYFCHQWSSYPPTFGSGTKLEIK
>Light Chain of P3D12 IgG histidine scanning variant #20 (SEQ ID NO: 568)
QIVLTQSPAILSLSPGERATLSCSASSSVTSNYLYWYQQKPGSSPKLLIYSTSNLASGV
PARFSGSGSGTSYTLTISSLEAEDAASYFCAQWSSYPPTFGSGTKLEIK
>Light Chain of P3D12 IgG histidine scanning variant #21 (SEQ ID NO: 569)
QIVLTQSPAILSLSPGERATLSCSASSSVTSNYLYWYQQKPGSSPKLLIYSTSNLASGV
PARFSGSGSGTSYTLTISSLEAEDAASYFCHHWSSYPPTFGSGTKLEIK
>Light Chain of P3D12 IgG histidine scanning variant #22 (SEQ ID NO: 570)
QIVLTQSPAILSLSPGERATLSCSASSSVTSNYLYWYQQKPGSSPKLLIYSTSNLASGV
PARFSGSGSGTSYTLTISSLEAEDAASYFCHQHSSYPPTFGSGTKLEIK
>Light Chain of P3D12 IgG histidine scanning variant #23 (SEQ ID NO: 571)
QIVLTQSPAILSLSPGERATLSCSASSSVTSNYLYWYQQKPGSSPKLLIYSTSNLASGV
PARFSGSGSGTSYTLTISSLEAEDAASYFCHQWHSYPPTFGSGTKLEIK
>Light Chain of P3D12 IgG histidine scanning variant #24 (SEQ ID NO: 572)
QIVLTQSPAILSLSPGERATLSCSASSSVTSNYLYWYQQKPGSSPKLLIYSTSNLASGV
PARFSGSGSGTSYTLTISSLEAEDAASYFCHQWSHYPPTFGSGTKLEIK
>Light Chain of P3D12 IgG histidine scanning variant #25 (SEQ ID NO: 573)
QIVLTQSPAILSLSPGERATLSCSASSSVTSNYLYWYQQKPGSSPKLLIYSTSNLASGV
PARFSGSGSGTSYTLTISSLEAEDAASYFCHQWSSHPPTFGSGTKLEIK
>Light Chain of P3D12 IgG histidine scanning variant #26 (SEQ ID NO: 574)
QIVLTQSPAILSLSPGERATLSCSASSSVTSNYLYWYQQKPGSSPKLLIYSTSNLASGV
PARFSGSGSGTSYTLTISSLEAEDAASYFCHQWSSYHPTFGSGTKLEIK
>Light Chain of P3D12 IgG histidine scanning variant #27 (SEQ ID NO: 575)
QIVLTQSPAILSLSPGERATLSCSASSSVTSNYLYWYQQKPGSSPKLLIYSTSNLASGV
PARFSGSGSGTSYTLTISSLEAEDAASYFCHQWSSYPHTFGSGTKLEIK
>Light Chain of P3D12 IgG histidine scanning variant #28 (SEQ ID NO: 576)
QIVLTQSPAILSLSPGERATLSCSASSSVTSNYLYWYQQKPGSSPKLLIYSTSNLASGV
PARFSGSGSGTSYTLTISSLEAEDAASYFCHQWSSYPPHFGSGTKLEIK
>Heavy Chain Combinations of P3D12 IgG histidine scanning variant #1 (SEQ ID NO: 577)
QVQLVQSGAEVKKPGASVKVSCKASGYTHTSYWMHWVKQAPGQGLDWIGHIKPST
DNTEYNQKFKDKATLTADKSTSTAYMELSSLRSEDTAVYYCARSYGNYPLMDYWG
QGTTVTVSS
>Heavy Chain Combinations of P3D12 IgG histidine scanning variant #2 (SEQ ID NO: 578)
QVQLVQSGAEVKKPGASVKVSCKASGYTHTSYWMHWVKQAPGQGLDWIGYIKPST
DNTHYNQKFKDKATLTADKSTSTAYMELSSLRSEDTAVYYCARSYGNYPLMDYWG
QGTTVTVSS
>Heavy Chain Combinations of P3D12 IgG histidine scanning variant #3 (SEQ ID NO: 579)
QVQLVQSGAEVKKPGASVKVSCKASGYTHTSYWMHWVKQAPGQGLDWIGYIKPST
DNTEYNQKFKDKATLTADKSTSTAYMELSSLRSEDTAVYYCARSYGHYPLMDYWG
QGTTVTVSS
>Heavy Chain Combinations of P3D12 IgG histidine scanning variant #4 (SEQ ID NO: 580)
QVQLVQSGAEVKKPGASVKVSCKASGYTHTSYWMHWVKQAPGQGLDWIGYIKPST
DNTEYNQKFKDKATLTADKSTSTAYMELSSLRSEDTAVYYCARSYGNYPLMHYWG
QGTTVTVSS
>Heavy Chain Combinations of P3D12 IgG histidine scanning variant #5 (SEQ ID NO: 581)
QVQLVQSGAEVKKPGASVKVSCKASGYTFTSYWMHWVKQAPGQGLDWIGHIKPST
DNTHYNQKFKDKATLTADKSTSTAYMELSSLRSEDTAVYYCARSYGNYPLMDYWG
QGTTVTVSS
>Heavy Chain Combinations of P3D12 IgG histidine scanning variant #6 (SEQ ID NO: 582)
QVQLVQSGAEVKKPGASVKVSCKASGYTFTSYWMHWVKQAPGQGLDWIGHIKPST
DNTEYNQKFKDKATLTADKSTSTAYMELSSLRSEDTAVYYCARSYGHYPLMDYWG
QGTTVTVSS
>Heavy Chain Combinations of P3D12 IgG histidine scanning variant #7 (SEQ ID NO: 583)
QVQLVQSGAEVKKPGASVKVSCKASGYTFTSYWMHWVKQAPGQGLDWIGHIKPST
DNTEYNQKFKDKATLTADKSTSTAYMELSSLRSEDTAVYYCARSYGNYPLMHYWG
QGTTVTVSS
>Heavy Chain Combinations of P3D12 IgG histidine scanning variant #8 (SEQ ID NO: 584)
QVQLVQSGAEVKKPGASVKVSCKASGYTFTSYWMHWVKQAPGQGLDWIGYIKPST
DNTHYNQKFKDKATLTADKSTSTAYMELSSLRSEDTAVYYCARSYGHYPLMDYWG
QGTTVTVSS
>Heavy Chain Combinations of P3D12 IgG histidine scanning variant #9 (SEQ ID NO: 585)
QVQLVQSGAEVKKPGASVKVSCKASGYTFTSYWMHWVKQAPGQGLDWIGYIKPST
DNTHYNQKFKDKATLTADKSTSTAYMELSSLRSEDTAVYYCARSYGNYPLMHYWG
QGTTVTVSS
>Heavy Chain Combinations of P3D12 IgG histidine scanning variant #10 (SEQ ID NO:
586)
QVQLVQSGAEVKKPGASVKVSCKASGYTFTSYWMHWVKQAPGQGLDWIGYIKPST
DNTEYNQKFKDKATLTADKSTSTAYMELSSLRSEDTAVYYCARSYGHYPLMHYWG
QGTTVTVSS
>Heavy Chain Combinations of P3D12 IgG histidine scanning variant #11 (SEQ ID NO:
587)
QVQLVQSGAEVKKPGASVKVSCKASGYTHTSYWMHWVKQAPGQGLDWIGHIKPST
DNTHYNQKFKDKATLTADKSTSTAYMELSSLRSEDTAVYYCARSYGNYPLMDYWG
QGTTVTVSS
>Heavy Chain Combinations of P3D12 IgG histidine scanning variant #12 (SEQ ID NO:
588)
QVQLVQSGAEVKKPGASVKVSCKASGYTHTSYWMHWVKQAPGQGLDWIGHIKPST
DNTEYNQKFKDKATLTADKSTSTAYMELSSLRSEDTAVYYCARSYGHYPLMDYWG
QGTTVTVSS
>Heavy Chain Combinations of P3D12 IgG histidine scanning variant #13 (SEQ ID NO:
589)
QVQLVQSGAEVKKPGASVKVSCKASGYTHTSYWMHWVKQAPGQGLDWIGHIKPST
DNTEYNQKFKDKATLTADKSTSTAYMELSSLRSEDTAVYYCARSYGNYPLMHYWG
QGTTVTVSS
>Heavy Chain Combinations of P3D12 IgG histidine scanning variant #14 (SEQ ID NO:
590)
QVQLVQSGAEVKKPGASVKVSCKASGYTHTSYWMHWVKQAPGQGLDWIGYIKPST
DNTHYNQKFKDKATLTADKSTSTAYMELSSLRSEDTAVYYCARSYGHYPLMDYWG
QGTTVTVSS
>Heavy Chain Combinations of P3D12 IgG histidine scanning variant #15 (SEQ ID NO:
591)
QVQLVQSGAEVKKPGASVKVSCKASGYTHTSYWMHWVKQAPGQGLDWIGYIKPST
DNTHYNQKFKDKATLTADKSTSTAYMELSSLRSEDTAVYYCARSYGNYPLMHYWG
QGTTVTVSS
>Heavy Chain Combinations of P3D12 IgG histidine scanning variant #16 (SEQ ID NO:
592)
QVQLVQSGAEVKKPGASVKVSCKASGYTHTSYWMHWVKQAPGQGLDWIGYIKPST
DNTEYNQKFKDKATLTADKSTSTAYMELSSLRSEDTAVYYCARSYGHYPLMHYWG
QGTTVTVSS
>Heavy Chain Combinations of P3D12 IgG histidine scanning variant #17 (SEQ ID NO:
593)
QVQLVQSGAEVKKPGASVKVSCKASGYTFTSYWMHWVKQAPGQGLDWIGHIKPST
DNTHYNQKFKDKATLTADKSTSTAYMELSSLRSEDTAVYYCARSYGHYPLMDYWG
QGTTVTVSS
>Heavy Chain Combinations of P3D12 IgG histidine scanning variant #18 (SEQ ID NO:
594)
QVQLVQSGAEVKKPGASVKVSCKASGYTFTSYWMHWVKQAPGQGLDWIGHIKPST
DNTHYNQKFKDKATLTADKSTSTAYMELSSLRSEDTAVYYCARSYGNYPLMHYWG
QGTTVTVSS
>Heavy Chain Combinations of P3D12 IgG histidine scanning variant #19 (SEQ ID NO:
595)
QVQLVQSGAEVKKPGASVKVSCKASGYTFTSYWMHWVKQAPGQGLDWIGHIKPST
DNTEYNQKFKDKATLTADKSTSTAYMELSSLRSEDTAVYYCARSYGHYPLMHYWG
QGTTVTVSS
>Heavy Chain Combinations of P3D12 IgG histidine scanning variant #20 (SEQ ID NO:
596)
QVQLVQSGAEVKKPGASVKVSCKASGYTFTSYWMHWVKQAPGQGLDWIGYIKPST
DNTHYNQKFKDKATLTADKSTSTAYMELSSLRSEDTAVYYCARSYGHYPLMHYWG
QGTTVTVSS
>Heavy Chain Combinations of P3D12 IgG histidine scanning variant #21 (SEQ ID NO:
597)
QVQLVQSGAEVKKPGASVKVSCKASGYTHTSYHMHWVKQAPGQGLDWIGYIKPST
DNTEYNQKFKDKATLTADKSTSTAYMELSSLRSEDTAVYYCARSYGNYPLMDYWG
QGTTVTVSS
>Heavy Chain Combinations of P3D12 IgG histidine scanning variant #22 (SEQ ID NO:
598)
QVQLVQSGAEVKKPGASVKVSCKASGYTFTSYHMHWVKQAPGQGLDWIGHIKPST
DNTEYNQKFKDKATLTADKSTSTAYMELSSLRSEDTAVYYCARSYGNYPLMDYWG
QGTTVTVSS
>Heavy Chain Combinations of P3D12 IgG histidine scanning variant #23 (SEQ ID NO:
599)
QVQLVQSGAEVKKPGASVKVSCKASGYTFTSYHMHWVKQAPGQGLDWIGYIKPST
DNTHYNQKFKDKATLTADKSTSTAYMELSSLRSEDTAVYYCARSYGNYPLMDYWG
QGTTVTVSS
>Heavy Chain Combinations of P3D12 IgG histidine scanning variant #24 (SEQ ID NO:
600)
QVQLVQSGAEVKKPGASVKVSCKASGYTFTSYHMHWVKQAPGQGLDWIGYIKPST
DNTEYNQKFKDKATLTADKSTSTAYMELSSLRSEDTAVYYCARSYGHYPLMDYWG
QGTTVTVSS
>Heavy Chain Combinations of P3D12 IgG histidine scanning variant #25 (SEQ ID NO:
601)
QVQLVQSGAEVKKPGASVKVSCKASGYTFTSYHMHWVKQAPGQGLDWIGYIKPST
DNTEYNQKFKDKATLTADKSTSTAYMELSSLRSEDTAVYYCARSYGNYPLMHYWG
QGTTVTVSS
>Heavy Chain Combinations of P3D12 IgG histidine scanning variant #26 (SEQ ID NO:
602)
QVQLVQSGAEVKKPGASVKVSCKASGYTHTSYWMAWVKQAPGQGLDWIGYIKPST
DNTEYNQKFKDKATLTADKSTSTAYMELSSLRSEDTAVYYCARSYGNYPLMDYWG
QGTTVTVSS
>Heavy Chain Combinations of P3D12 IgG histidine scanning variant #27 (SEQ ID NO:
603)
QVQLVQSGAEVKKPGASVKVSCKASGYTFTSYWMAWVKQAPGQGLDWIGHIKPST
DNTEYNQKFKDKATLTADKSTSTAYMELSSLRSEDTAVYYCARSYGNYPLMDYWG
QGTTVTVSS
>Heavy Chain Combinations of P3D12 IgG histidine scanning variant #28 (SEQ ID NO:
604)
QVQLVQSGAEVKKPGASVKVSCKASGYTFTSYWMAWVKQAPGQGLDWIGYIKPST
DNTHYNQKFKDKATLTADKSTSTAYMELSSLRSEDTAVYYCARSYGNYPLMDYWG
QGTTVTVSS
>Heavy Chain Combinations of P3D12 IgG histidine scanning variant #29 (SEQ ID NO:
605)
QVQLVQSGAEVKKPGASVKVSCKASGYTFTSYWMAWVKQAPGQGLDWIGYIKPST
DNTEYNQKFKDKATLTADKSTSTAYMELSSLRSEDTAVYYCARSYGHYPLMDYWG
QGTTVTVSS
>Heavy Chain Combinations of P3D12 IgG histidine scanning variant #30 (SEQ ID NO:
606)
QVQLVQSGAEVKKPGASVKVSCKASGYTFTSYWMAWVKQAPGQGLDWIGYIKPST
DNTEYNQKFKDKATLTADKSTSTAYMELSSLRSEDTAVYYCARSYGNYPLMHYWG
QGTTVTVSS
>Heavy Chain Combinations of P3D12 IgG histidine scanning variant #31 (SEQ ID NO:
607)
QVQLVQSGAEVKKPGASVKVSCKASGYTHTSYWMHWVKQAPGQGLDWIGYIKPST
DNTEYNQKFKDKATLTADKSTSTAYMELSSLRSEDTAVYYCARSYGNHPLMDYWG
QGTTVTVSS
>Heavy Chain Combinations of P3D12 IgG histidine scanning variant #32 (SEQ ID NO:
608)
QVQLVQSGAEVKKPGASVKVSCKASGYTFTSYWMHWVKQAPGQGLDWIGHIKPST
DNTEYNQKFKDKATLTADKSTSTAYMELSSLRSEDTAVYYCARSYGNHPLMDYWG
QGTTVTVSS
>Heavy Chain Combinations of P3D12 IgG histidine scanning variant #33 (SEQ ID NO:
609)
QVQLVQSGAEVKKPGASVKVSCKASGYTFTSYWMHWVKQAPGQGLDWIGYIKPST
DNTHYNQKFKDKATLTADKSTSTAYMELSSLRSEDTAVYYCARSYGNHPLMDYWG
QGTTVTVSS
>Heavy Chain Combinations of P3D12 IgG histidine scanning variant #34 (SEQ ID NO:
610)
QVQLVQSGAEVKKPGASVKVSCKASGYTFTSYWMHWVKQAPGQGLDWIGYIKPST
DNTEYNQKFKDKATLTADKSTSTAYMELSSLRSEDTAVYYCARSYGHHPLMDYWG
QGTTVTVSS
>Heavy Chain Combinations of P3D12 IgG histidine scanning variant #35 (SEQ ID NO:
611)
QVQLVQSGAEVKKPGASVKVSCKASGYTFTSYWMHWVKQAPGQGLDWIGYIKPST
DNTEYNQKFKDKATLTADKSTSTAYMELSSLRSEDTAVYYCARSYGNHPLMHYWG
QGTTVTVSS
>Heavy Chain Combinations of P3D12 IgG histidine scanning variant #36 (SEQ ID NO:
612)
QVQLVQSGAEVKKPGASVKVSCKASGYTHTSYWMHWVKQAPGQGLDWIGYIKPST
DNTEYNQKFKDKATLTADKSTSTAYMELSSLRSEDTAVYYCARSYGNYPLHDYWG
QGTTVTVSS
>Heavy Chain Combinations of P3D12 IgG histidine scanning variant #37 (SEQ ID NO:
613)
QVQLVQSGAEVKKPGASVKVSCKASGYTFTSYWMHWVKQAPGQGLDWIGHIKPST
DNTEYNQKFKDKATLTADKSTSTAYMELSSLRSEDTAVYYCARSYGNYPLHDYWG
QGTTVTVSS
>Heavy Chain Combinations of P3D12 IgG histidine scanning variant #38 (SEQ ID NO:
614)
QVQLVQSGAEVKKPGASVKVSCKASGYTFTSYWMHWVKQAPGQGLDWIGYIKPST
DNTHYNQKFKDKATLTADKSTSTAYMELSSLRSEDTAVYYCARSYGNYPLHDYWG
QGTTVTVSS
>Heavy Chain Combinations of P3D12 IgG histidine scanning variant #39 (SEQ ID NO:
615)
QVQLVQSGAEVKKPGASVKVSCKASGYTFTSYWMHWVKQAPGQGLDWIGYIKPST
DNTEYNQKFKDKATLTADKSTSTAYMELSSLRSEDTAVYYCARSYGHYPLHDYWG
QGTTVTVSS
>Heavy Chain Combinations of P3D12 IgG histidine scanning variant #40 (SEQ ID NO:
616)
QVQLVQSGAEVKKPGASVKVSCKASGYTFTSYWMHWVKQAPGQGLDWIGYIKPST
DNTEYNQKFKDKATLTADKSTSTAYMELSSLRSEDTAVYYCARSYGNYPLHHYWG
QGTTVTVSS
>Heavy Chain Combinations of P3D12 IgG histidine scanning variant #41 (SEQ ID NO:
617)
QVQLVQSGAEVKKPGASVKVSCKASGYTFTSYHMAWVKQAPGQGLDWIGYIKPST
DNTEYNQKFKDKATLTADKSTSTAYMELSSLRSEDTAVYYCARSYGNYPLMDYWG
QGTTVTVSS
>Heavy Chain Combinations of P3D12 IgG histidine scanning variant #42 (SEQ ID NO:
618)
QVQLVQSGAEVKKPGASVKVSCKASGYTFTSYHMHWVKQAPGQGLDWIGYIKPST
DNTEYNQKFKDKATLTADKSTSTAYMELSSLRSEDTAVYYCARSYGNHPLMDYWG
QGTTVTVSS
>Heavy Chain Combinations of P3D12 IgG histidine scanning variant #43 (SEQ ID NO:
619)
QVQLVQSGAEVKKPGASVKVSCKASGYTFTSYHMHWVKQAPGQGLDWIGYIKPST
DNTEYNQKFKDKATLTADKSTSTAYMELSSLRSEDTAVYYCARSYGNYPLHDYWG
QGTTVTVSS
>Heavy Chain Combinations of P3D12 IgG histidine scanning variant #44 (SEQ ID NO:
620)
QVQLVQSGAEVKKPGASVKVSCKASGYTFTSYWMAWVKQAPGQGLDWIGYIKPST
DNTEYNQKFKDKATLTADKSTSTAYMELSSLRSEDTAVYYCARSYGNHPLMDYWG
QGTTVTVSS
>Heavy Chain Combinations of P3D12 IgG histidine scanning variant #45 (SEQ ID NO:
621)
QVQLVQSGAEVKKPGASVKVSCKASGYTFTSYWMAWVKQAPGQGLDWIGYIKPST
DNTEYNQKFKDKATLTADKSTSTAYMELSSLRSEDTAVYYCARSYGNYPLHDYWG
QGTTVTVSS
>Heavy Chain Combinations of P3D12 IgG histidine scanning variant #46 (SEQ ID NO:
622)
QVQLVQSGAEVKKPGASVKVSCKASGYTFTSYWMHWVKQAPGQGLDWIGYIKPST
DNTEYNQKFKDKATLTADKSTSTAYMELSSLRSEDTAVYYCARSYGNHPLHDYWG
QGTTVTVSS
>Heavy Chain Combinations of P3D12 IgG histidine scanning variant #47 (SEQ ID NO:
623)
QVQLVQSGAEVKKPGASVKVSCKASGYTFTSYHMAWVKQAPGQGLDWIGYIKPST
DNTEYNQKFKDKATLTADKSTSTAYMELSSLRSEDTAVYYCARSYGNHPLMDYWG
QGTTVTVSS
>Heavy Chain Combinations of P3D12 IgG histidine scanning variant #48 (SEQ ID NO:
624)
QVQLVQSGAEVKKPGASVKVSCKASGYTFTSYHMAWVKQAPGQGLDWIGYIKPST
DNTEYNQKFKDKATLTADKSTSTAYMELSSLRSEDTAVYYCARSYGNYPLHDYWG
QGTTVTVSS
>Heavy Chain Combinations of P3D12 IgG histidine scanning variant #49 (SEQ ID NO:
625)
QVQLVQSGAEVKKPGASVKVSCKASGYTFTSYHMHWVKQAPGQGLDWIGYIKPST
DNTEYNQKFKDKATLTADKSTSTAYMELSSLRSEDTAVYYCARSYGNHPLHDYWG
QGTTVTVSS
>Heavy Chain Combinations of P3D12 IgG histidine scanning variant #50 (SEQ ID NO:
626)
QVQLVQSGAEVKKPGASVKVSCKASGYTFTSYWMAWVKQAPGQGLDWIGYIKPST
DNTEYNQKFKDKATLTADKSTSTAYMELSSLRSEDTAVYYCARSYGNHPLHDYWG
QGTTVTVSS
>Heavy Chain Combinations of P3D12 IgG histidine scanning variant #51 (SEQ ID NO:
627)
QVQLVQSGAEVKKPGASVKVSCKASGYTHTSYHMAWVKQAPGQGLDWIGYIKPST
DNTEYNQKFKDKATLTADKSTSTAYMELSSLRSEDTAVYYCARSYGNYPLMDYWG
QGTTVTVSS
>Heavy Chain Combinations of P3D12 IgG histidine scanning variant #52 (SEQ ID NO:
628)
QVQLVQSGAEVKKPGASVKVSCKASGYTHTSYHMHWVKQAPGQGLDWIGYIKPST
DNTEYNQKFKDKATLTADKSTSTAYMELSSLRSEDTAVYYCARSYGNHPLMDYWG
QGTTVTVSS
>Heavy Chain Combinations of P3D12 IgG histidine scanning variant #53 (SEQ ID NO:
629)
QVQLVQSGAEVKKPGASVKVSCKASGYTHTSYHMHWVKQAPGQGLDWIGYIKPST
DNTEYNQKFKDKATLTADKSTSTAYMELSSLRSEDTAVYYCARSYGNYPLHDYWG
QGTTVTVSS
>Heavy Chain Combinations of P3D12 IgG histidine scanning variant #54 (SEQ ID NO:
630)
QVQLVQSGAEVKKPGASVKVSCKASGYTHTSYWMAWVKQAPGQGLDWIGYIKPST
DNTEYNQKFKDKATLTADKSTSTAYMELSSLRSEDTAVYYCARSYGNHPLMDYWG
QGTTVTVSS
>Heavy Chain Combinations of P3D12 IgG histidine scanning variant #55 (SEQ ID NO:
631)
QVQLVQSGAEVKKPGASVKVSCKASGYTHTSYWMAWVKQAPGQGLDWIGYIKPST
DNTEYNQKFKDKATLTADKSTSTAYMELSSLRSEDTAVYYCARSYGNYPLHDYWG
QGTTVTVSS
>Heavy Chain Combinations of P3D12 IgG histidine scanning variant #56 (SEQ ID NO:
632)
QVQLVQSGAEVKKPGASVKVSCKASGYTHTSYWMHWVKQAPGQGLDWIGYIKPST
DNTEYNQKFKDKATLTADKSTSTAYMELSSLRSEDTAVYYCARSYGNHPLHDYWG
QGTTVTVSS
>Heavy Chain Combinations of P3D12 IgG histidine scanning variant #57 (SEQ ID NO:
633)
QVQLVQSGAEVKKPGASVKVSCKASGYTFTSYHMAWVKQAPGQGLDWIGHIKPST
DNTEYNQKFKDKATLTADKSTSTAYMELSSLRSEDTAVYYCARSYGNYPLMDYWG
QGTTVTVSS
>Heavy Chain Combinations of P3D12 IgG histidine scanning variant #58 (SEQ ID NO:
634)
QVQLVQSGAEVKKPGASVKVSCKASGYTFTSYHMHWVKQAPGQGLDWIGHIKPST
DNTEYNQKFKDKATLTADKSTSTAYMELSSLRSEDTAVYYCARSYGNHPLMDYWG
QGTTVTVSS
>Heavy Chain Combinations of P3D12 IgG histidine scanning variant #59 (SEQ ID NO:
635)
QVQLVQSGAEVKKPGASVKVSCKASGYTFTSYHMHWVKQAPGQGLDWIGHIKPST
DNTEYNQKFKDKATLTADKSTSTAYMELSSLRSEDTAVYYCARSYGNYPLHDYWG
QGTTVTVSS
>Heavy Chain Combinations of P3D12 IgG histidine scanning variant #60 (SEQ ID NO:
636)
QVQLVQSGAEVKKPGASVKVSCKASGYTFTSYWMAWVKQAPGQGLDWIGHIKPST
DNTEYNQKFKDKATLTADKSTSTAYMELSSLRSEDTAVYYCARSYGNHPLMDYWG
QGTTVTVSS
>Heavy Chain Combinations of P3D12 IgG histidine scanning variant #61 (SEQ ID NO:
637)
QVQLVQSGAEVKKPGASVKVSCKASGYTFTSYWMAWVKQAPGQGLDWIGHIKPST
DNTEYNQKFKDKATLTADKSTSTAYMELSSLRSEDTAVYYCARSYGNYPLHDYWG
QGTTVTVSS
>Heavy Chain Combinations of P3D12 IgG histidine scanning variant #62 (SEQ ID NO:
638)
QVQLVQSGAEVKKPGASVKVSCKASGYTFTSYWMHWVKQAPGQGLDWIGHIKPST
DNTEYNQKFKDKATLTADKSTSTAYMELSSLRSEDTAVYYCARSYGNHPLHDYWG
QGTTVTVSS
>Heavy Chain Combinations of P3D12 IgG histidine scanning variant #63 (SEQ ID NO:
639)
QVQLVQSGAEVKKPGASVKVSCKASGYTFTSYHMAWVKQAPGQGLDWIGYIKPST
DNTHYNQKFKDKATLTADKSTSTAYMELSSLRSEDTAVYYCARSYGNYPLMDYWG
QGTTVTVSS
>Heavy Chain Combinations of P3D12 IgG histidine scanning variant #64 (SEQ ID NO:
640)
QVQLVQSGAEVKKPGASVKVSCKASGYTFTSYHMHWVKQAPGQGLDWIGYIKPST
DNTHYNQKFKDKATLTADKSTSTAYMELSSLRSEDTAVYYCARSYGNHPLMDYWG
QGTTVTVSS
>Heavy Chain Combinations of P3D12 IgG histidine scanning variant #65 (SEQ ID NO:
641)
QVQLVQSGAEVKKPGASVKVSCKASGYTFTSYHMHWVKQAPGQGLDWIGYIKPST
DNTHYNQKFKDKATLTADKSTSTAYMELSSLRSEDTAVYYCARSYGNYPLHDYWG
QGTTVTVSS
>Heavy Chain Combinations of P3D12 IgG histidine scanning variant #66 (SEQ ID NO:
642)
QVQLVQSGAEVKKPGASVKVSCKASGYTFTSYWMAWVKQAPGQGLDWIGYIKPST
DNTHYNQKFKDKATLTADKSTSTAYMELSSLRSEDTAVYYCARSYGNHPLMDYWG
QGTTVTVSS
>Heavy Chain Combinations of P3D12 IgG histidine scanning variant #67 (SEQ ID NO:
643)
QVQLVQSGAEVKKPGASVKVSCKASGYTFTSYWMAWVKQAPGQGLDWIGYIKPST
DNTHYNQKFKDKATLTADKSTSTAYMELSSLRSEDTAVYYCARSYGNYPLHDYWG
QGTTVTVSS
>Heavy Chain Combinations of P3D12 IgG histidine scanning variant #68 (SEQ ID NO:
644)
QVQLVQSGAEVKKPGASVKVSCKASGYTFTSYWMHWVKQAPGQGLDWIGYIKPST
DNTHYNQKFKDKATLTADKSTSTAYMELSSLRSEDTAVYYCARSYGNHPLHDYWG
QGTTVTVSS
>Heavy Chain Combinations of P3D12 IgG histidine scanning variant #69 (SEQ ID NO:
645)
QVQLVQSGAEVKKPGASVKVSCKASGYTFTSYHMAWVKQAPGQGLDWIGYIKPST
DNTEYNQKFKDKATLTADKSTSTAYMELSSLRSEDTAVYYCARSYGHYPLMDYWG
QGTTVTVSS
>Heavy Chain Combinations of P3D12 IgG histidine scanning variant #70 (SEQ ID NO:
646)
QVQLVQSGAEVKKPGASVKVSCKASGYTFTSYHMHWVKQAPGQGLDWIGYIKPST
DNTEYNQKFKDKATLTADKSTSTAYMELSSLRSEDTAVYYCARSYGHHPLMDYWG
QGTTVTVSS
>Heavy Chain Combinations of P3D12 IgG histidine scanning variant #71 (SEQ ID NO:
647)
QVQLVQSGAEVKKPGASVKVSCKASGYTFTSYHMHWVKQAPGQGLDWIGYIKPST
DNTEYNQKFKDKATLTADKSTSTAYMELSSLRSEDTAVYYCARSYGHYPLHDYWG
QGTTVTVSS
>Heavy Chain Combinations of P3D12 IgG histidine scanning variant #72 (SEQ ID NO:
648)
QVQLVQSGAEVKKPGASVKVSCKASGYTFTSYWMAWVKQAPGQGLDWIGYIKPST
DNTEYNQKFKDKATLTADKSTSTAYMELSSLRSEDTAVYYCARSYGHHPLMDYWG
QGTTVTVSS
>Heavy Chain Combinations of P3D12 IgG histidine scanning variant #73 (SEQ ID NO:
649)
QVQLVQSGAEVKKPGASVKVSCKASGYTFTSYWMAWVKQAPGQGLDWIGYIKPST
DNTEYNQKFKDKATLTADKSTSTAYMELSSLRSEDTAVYYCARSYGHYPLHDYWG
QGTTVTVSS
>Heavy Chain Combinations of P3D12 IgG histidine scanning variant #74 (SEQ ID NO:
650)
QVQLVQSGAEVKKPGASVKVSCKASGYTFTSYWMHWVKQAPGQGLDWIGYIKPST
DNTEYNQKFKDKATLTADKSTSTAYMELSSLRSEDTAVYYCARSYGHHPLHDYWG
QGTTVTVSS
>Heavy Chain Combinations of P3D12 IgG histidine scanning variant #75 (SEQ ID NO:
651)
QVQLVQSGAEVKKPGASVKVSCKASGYTFTSYHMAWVKQAPGQGLDWIGYIKPST
DNTEYNQKFKDKATLTADKSTSTAYMELSSLRSEDTAVYYCARSYGNYPLMHYWG
QGTTVTVSS
>Heavy Chain Combinations of P3D12 IgG histidine scanning variant #76 (SEQ ID NO:
652)
QVQLVQSGAEVKKPGASVKVSCKASGYTFTSYHMHWVKQAPGQGLDWIGYIKPST
DNTEYNQKFKDKATLTADKSTSTAYMELSSLRSEDTAVYYCARSYGNHPLMHYWG
QGTTVTVSS
>Heavy Chain Combinations of P3D12 IgG histidine scanning variant #77 (SEQ ID NO:
653)
QVQLVQSGAEVKKPGASVKVSCKASGYTFTSYHMHWVKQAPGQGLDWIGYIKPST
DNTEYNQKFKDKATLTADKSTSTAYMELSSLRSEDTAVYYCARSYGNYPLHHYWG
QGTTVTVSS
>Heavy Chain Combinations of P3D12 IgG histidine scanning variant #78 (SEQ ID NO:
654)
QVQLVQSGAEVKKPGASVKVSCKASGYTFTSYWMAWVKQAPGQGLDWIGYIKPST
DNTEYNQKFKDKATLTADKSTSTAYMELSSLRSEDTAVYYCARSYGNHPLMHYWG
QGTTVTVSS
>Heavy Chain Combinations of P3D12 IgG histidine scanning variant #79 (SEQ ID NO:
655)
QVQLVQSGAEVKKPGASVKVSCKASGYTFTSYWMAWVKQAPGQGLDWIGYIKPST
DNTEYNQKFKDKATLTADKSTSTAYMELSSLRSEDTAVYYCARSYGNYPLHHYWG
QGTTVTVSS
>Heavy Chain Combinations of P3D12 IgG histidine scanning variant #80 (SEQ ID NO:
656)
QVQLVQSGAEVKKPGASVKVSCKASGYTFTSYWMHWVKQAPGQGLDWIGYIKPST
DNTEYNQKFKDKATLTADKSTSTAYMELSSLRSEDTAVYYCARSYGNHPLHHYWG
QGTTVTVSS
>Heavy Chain Combinations of P3D12 IgG histidine scanning variant #81 (SEQ ID NO:
657)
QVQLVQSGAEVKKPGASVKVSCKASGYTHTSYHMHWVKQAPGQGLDWIGHIKPST
DNTEYNQKFKDKATLTADKSTSTAYMELSSLRSEDTAVYYCARSYGNYPLMDYWG
QGTTVTVSS
>Heavy Chain Combinations of P3D12 IgG histidine scanning variant #82 (SEQ ID NO:
658)
QVQLVQSGAEVKKPGASVKVSCKASGYTHTSYHMHWVKQAPGQGLDWIGYIKPST
DNTHYNQKFKDKATLTADKSTSTAYMELSSLRSEDTAVYYCARSYGNYPLMDYWG
QGTTVTVSS
>Heavy Chain Combinations of P3D12 IgG histidine scanning variant #83 (SEQ ID NO:
659)
QVQLVQSGAEVKKPGASVKVSCKASGYTHTSYHMHWVKQAPGQGLDWIGYIKPST
DNTEYNQKFKDKATLTADKSTSTAYMELSSLRSEDTAVYYCARSYGHYPLMDYWG
QGTTVTVSS
>Heavy Chain Combinations of P3D12 IgG histidine scanning variant #84 (SEQ ID NO:
660)
QVQLVQSGAEVKKPGASVKVSCKASGYTHTSYHMHWVKQAPGQGLDWIGYIKPST
DNTEYNQKFKDKATLTADKSTSTAYMELSSLRSEDTAVYYCARSYGNYPLMHYWG
QGTTVTVSS
>Heavy Chain Combinations of P3D12 IgG histidine scanning variant #85 (SEQ ID NO:
661)
QVQLVQSGAEVKKPGASVKVSCKASGYTFTSYHMHWVKQAPGQGLDWIGHIKPST
DNTHYNQKFKDKATLTADKSTSTAYMELSSLRSEDTAVYYCARSYGNYPLMDYWG
QGTTVTVSS
>Heavy Chain Combinations of P3D12 IgG histidine scanning variant #86 (SEQ ID NO:
662)
QVQLVQSGAEVKKPGASVKVSCKASGYTFTSYHMHWVKQAPGQGLDWIGHIKPST
DNTEYNQKFKDKATLTADKSTSTAYMELSSLRSEDTAVYYCARSYGHYPLMDYWG
QGTTVTVSS
>Heavy Chain Combinations of P3D12 IgG histidine scanning variant #87 (SEQ ID NO:
663)
QVQLVQSGAEVKKPGASVKVSCKASGYTFTSYHMHWVKQAPGQGLDWIGHIKPST
DNTEYNQKFKDKATLTADKSTSTAYMELSSLRSEDTAVYYCARSYGNYPLMHYWG
QGTTVTVSS
>Heavy Chain Combinations of P3D12 IgG histidine scanning variant #88 (SEQ ID NO:
664)
QVQLVQSGAEVKKPGASVKVSCKASGYTFTSYHMHWVKQAPGQGLDWIGYIKPST
DNTHYNQKFKDKATLTADKSTSTAYMELSSLRSEDTAVYYCARSYGHYPLMDYWG
QGTTVTVSS
>Heavy Chain Combinations of P3D12 IgG histidine scanning variant #89 (SEQ ID NO:
665)
QVQLVQSGAEVKKPGASVKVSCKASGYTFTSYHMHWVKQAPGQGLDWIGYIKPST
DNTHYNQKFKDKATLTADKSTSTAYMELSSLRSEDTAVYYCARSYGNYPLMHYWG
QGTTVTVSS
>Heavy Chain Combinations of P3D12 IgG histidine scanning variant #90 (SEQ ID NO:
666)
QVQLVQSGAEVKKPGASVKVSCKASGYTFTSYHMHWVKQAPGQGLDWIGYIKPST
DNTEYNQKFKDKATLTADKSTSTAYMELSSLRSEDTAVYYCARSYGHYPLMHYWG
QGTTVTVSS
>Heavy Chain Combinations of P3D12 IgG histidine scanning variant #91 (SEQ ID NO:
667)
QVQLVQSGAEVKKPGASVKVSCKASGYTHTSYWMAWVKQAPGQGLDWIGHIKPST
DNTEYNQKFKDKATLTADKSTSTAYMELSSLRSEDTAVYYCARSYGNYPLMDYWG
QGTTVTVSS
>Heavy Chain Combinations of P3D12 IgG histidine scanning variant #92 (SEQ ID NO:
668)
QVQLVQSGAEVKKPGASVKVSCKASGYTHTSYWMAWVKQAPGQGLDWIGYIKPST
DNTHYNQKFKDKATLTADKSTSTAYMELSSLRSEDTAVYYCARSYGNYPLMDYWG
QGTTVTVSS
>Heavy Chain Combinations of P3D12 IgG histidine scanning variant #93 (SEQ ID NO:
669)
QVQLVQSGAEVKKPGASVKVSCKASGYTHTSYWMAWVKQAPGQGLDWIGYIKPST
DNTEYNQKFKDKATLTADKSTSTAYMELSSLRSEDTAVYYCARSYGHYPLMDYWG
QGTTVTVSS
>Heavy Chain Combinations of P3D12 IgG histidine scanning variant #94 (SEQ ID NO:
670)
QVQLVQSGAEVKKPGASVKVSCKASGYTHTSYWMAWVKQAPGQGLDWIGYIKPST
DNTEYNQKFKDKATLTADKSTSTAYMELSSLRSEDTAVYYCARSYGNYPLMHYWG
QGTTVTVSS
>Heavy Chain Combinations of P3D12 IgG histidine scanning variant #95 (SEQ ID NO:
671)
QVQLVQSGAEVKKPGASVKVSCKASGYTFTSYWMAWVKQAPGQGLDWIGHIKPST
DNTHYNQKFKDKATLTADKSTSTAYMELSSLRSEDTAVYYCARSYGNYPLMDYWG
QGTTVTVSS
>Heavy Chain Combinations of P3D12 IgG histidine scanning variant #96 (SEQ ID NO:
672)
QVQLVQSGAEVKKPGASVKVSCKASGYTFTSYWMAWVKQAPGQGLDWIGHIKPST
DNTEYNQKFKDKATLTADKSTSTAYMELSSLRSEDTAVYYCARSYGHYPLMDYWG
QGTTVTVSS
>Heavy Chain Combinations of P3D12 IgG histidine scanning variant #97 (SEQ ID NO:
673)
QVQLVQSGAEVKKPGASVKVSCKASGYTFTSYWMAWVKQAPGQGLDWIGHIKPST
DNTEYNQKFKDKATLTADKSTSTAYMELSSLRSEDTAVYYCARSYGNYPLMHYWG
QGTTVTVSS
>Heavy Chain Combinations of P3D12 IgG histidine scanning variant #98 (SEQ ID NO:
674)
QVQLVQSGAEVKKPGASVKVSCKASGYTFTSYWMAWVKQAPGQGLDWIGYIKPST
DNTHYNQKFKDKATLTADKSTSTAYMELSSLRSEDTAVYYCARSYGHYPLMDYWG
QGTTVTVSS
>Heavy Chain Combinations of P3D12 IgG histidine scanning variant #99 (SEQ ID NO:
675)
QVQLVQSGAEVKKPGASVKVSCKASGYTFTSYWMAWVKQAPGQGLDWIGYIKPST
DNTHYNQKFKDKATLTADKSTSTAYMELSSLRSEDTAVYYCARSYGNYPLMHYWG
QGTTVTVSS
>Heavy Chain Combinations of P3D12 IgG histidine scanning variant #100 (SEQ ID NO:
676)
QVQLVQSGAEVKKPGASVKVSCKASGYTFTSYWMAWVKQAPGQGLDWIGYIKPST
DNTEYNQKFKDKATLTADKSTSTAYMELSSLRSEDTAVYYCARSYGHYPLMHYWG
QGTTVTVSS
>Heavy Chain Combinations of P3D12 IgG histidine scanning variant #101 (SEQ ID NO:
677)
QVQLVQSGAEVKKPGASVKVSCKASGYTHTSYWMHWVKQAPGQGLDWIGHIKPST
DNTEYNQKFKDKATLTADKSTSTAYMELSSLRSEDTAVYYCARSYGNHPLMDYWG
QGTTVTVSS
>Heavy Chain Combinations of P3D12 IgG histidine scanning variant #102 (SEQ ID NO:
678)
QVQLVQSGAEVKKPGASVKVSCKASGYTHTSYWMHWVKQAPGQGLDWIGYIKPST
DNTHYNQKFKDKATLTADKSTSTAYMELSSLRSEDTAVYYCARSYGNHPLMDYWG
QGTTVTVSS
>Heavy Chain Combinations of P3D12 IgG histidine scanning variant #103 (SEQ ID NO:
679)
QVQLVQSGAEVKKPGASVKVSCKASGYTHTSYWMHWVKQAPGQGLDWIGYIKPST
DNTEYNQKFKDKATLTADKSTSTAYMELSSLRSEDTAVYYCARSYGHHPLMDYWG
QGTTVTVSS
>Heavy Chain Combinations of P3D12 IgG histidine scanning variant #104 (SEQ ID NO:
680)
QVQLVQSGAEVKKPGASVKVSCKASGYTHTSYWMHWVKQAPGQGLDWIGYIKPST
DNTEYNQKFKDKATLTADKSTSTAYMELSSLRSEDTAVYYCARSYGNHPLMHYWG
QGTTVTVSS
>Heavy Chain Combinations of P3D12 IgG histidine scanning variant #105 (SEQ ID NO:
681)
QVQLVQSGAEVKKPGASVKVSCKASGYTFTSYWMHWVKQAPGQGLDWIGHIKPST
DNTHYNQKFKDKATLTADKSTSTAYMELSSLRSEDTAVYYCARSYGNHPLMDYWG
QGTTVTVSS
>Heavy Chain Combinations of P3D12 IgG histidine scanning variant #106 (SEQ ID NO:
682)
QVQLVQSGAEVKKPGASVKVSCKASGYTFTSYWMHWVKQAPGQGLDWIGHIKPST
DNTEYNQKFKDKATLTADKSTSTAYMELSSLRSEDTAVYYCARSYGHHPLMDYWG
QGTTVTVSS
>Heavy Chain Combinations of P3D12 IgG histidine scanning variant #107 (SEQ ID NO:
683)
QVQLVQSGAEVKKPGASVKVSCKASGYTFTSYWMHWVKQAPGQGLDWIGHIKPST
DNTEYNQKFKDKATLTADKSTSTAYMELSSLRSEDTAVYYCARSYGNHPLMHYWG
QGTTVTVSS
>Heavy Chain Combinations of P3D12 IgG histidine scanning variant #108 (SEQ ID NO:
684)
QVQLVQSGAEVKKPGASVKVSCKASGYTFTSYWMHWVKQAPGQGLDWIGYIKPST
DNTHYNQKFKDKATLTADKSTSTAYMELSSLRSEDTAVYYCARSYGHHPLMDYWG
QGTTVTVSS
>Heavy Chain Combinations of P3D12 IgG histidine scanning variant #109 (SEQ ID NO:
685)
QVQLVQSGAEVKKPGASVKVSCKASGYTFTSYWMHWVKQAPGQGLDWIGYIKPST
DNTHYNQKFKDKATLTADKSTSTAYMELSSLRSEDTAVYYCARSYGNHPLMHYWG
QGTTVTVSS
>Heavy Chain Combinations of P3D12 IgG histidine scanning variant #110 (SEQ ID NO:
686)
QVQLVQSGAEVKKPGASVKVSCKASGYTFTSYWMHWVKQAPGQGLDWIGYIKPST
DNTEYNQKFKDKATLTADKSTSTAYMELSSLRSEDTAVYYCARSYGHHPLMHYWG
QGTTVTVSS
>Heavy Chain Combinations of P3D12 IgG histidine scanning variant #111 (SEQ ID NO:
687)
QVQLVQSGAEVKKPGASVKVSCKASGYTHTSYWMHWVKQAPGQGLDWIGHIKPST
DNTEYNQKFKDKATLTADKSTSTAYMELSSLRSEDTAVYYCARSYGNYPLHDYWG
QGTTVTVSS
>Heavy Chain Combinations of P3D12 IgG histidine scanning variant #112 (SEQ ID NO:
688)
QVQLVQSGAEVKKPGASVKVSCKASGYTHTSYWMHWVKQAPGQGLDWIGYIKPST
DNTHYNQKFKDKATLTADKSTSTAYMELSSLRSEDTAVYYCARSYGNYPLHDYWG
QGTTVTVSS
>Heavy Chain Combinations of P3D12 IgG histidine scanning variant #113 (SEQ ID NO:
689)
QVQLVQSGAEVKKPGASVKVSCKASGYTHTSYWMHWVKQAPGQGLDWIGYIKPST
DNTEYNQKFKDKATLTADKSTSTAYMELSSLRSEDTAVYYCARSYGHYPLHDYWG
QGTTVTVSS
>Heavy Chain Combinations of P3D12 IgG histidine scanning variant #114 (SEQ ID NO:
690)
QVQLVQSGAEVKKPGASVKVSCKASGYTHTSYWMHWVKQAPGQGLDWIGYIKPST
DNTEYNQKFKDKATLTADKSTSTAYMELSSLRSEDTAVYYCARSYGNYPLHHYWG
QGTTVTVSS
>Heavy Chain Combinations of P3D12 IgG histidine scanning variant #115 (SEQ ID NO:
691)
QVQLVQSGAEVKKPGASVKVSCKASGYTFTSYWMHWVKQAPGQGLDWIGHIKPST
DNTHYNQKFKDKATLTADKSTSTAYMELSSLRSEDTAVYYCARSYGNYPLHDYWG
QGTTVTVSS
>Heavy Chain Combinations of P3D12 IgG histidine scanning variant #116 (SEQ ID NO:
692)
QVQLVQSGAEVKKPGASVKVSCKASGYTFTSYWMHWVKQAPGQGLDWIGHIKPST
DNTEYNQKFKDKATLTADKSTSTAYMELSSLRSEDTAVYYCARSYGHYPLHDYWG
QGTTVTVSS
>Heavy Chain Combinations of P3D12 IgG histidine scanning variant #117 (SEQ ID NO:
693)
QVQLVQSGAEVKKPGASVKVSCKASGYTFTSYWMHWVKQAPGQGLDWIGHIKPST
DNTEYNQKFKDKATLTADKSTSTAYMELSSLRSEDTAVYYCARSYGNYPLHHYWG
QGTTVTVSS
>Heavy Chain Combinations of P3D12 IgG histidine scanning variant #118 (SEQ ID NO:
694)
QVQLVQSGAEVKKPGASVKVSCKASGYTFTSYWMHWVKQAPGQGLDWIGYIKPST
DNTHYNQKFKDKATLTADKSTSTAYMELSSLRSEDTAVYYCARSYGHYPLHDYWG
QGTTVTVSS
>Heavy Chain Combinations of P3D12 IgG histidine scanning variant #119 (SEQ ID NO:
695)
QVQLVQSGAEVKKPGASVKVSCKASGYTFTSYWMHWVKQAPGQGLDWIGYIKPST
DNTHYNQKFKDKATLTADKSTSTAYMELSSLRSEDTAVYYCARSYGNYPLHHYWG
QGTTVTVSS
>Heavy Chain Combinations of P3D12 IgG histidine scanning variant #120 (SEQ ID NO:
696)
QVQLVQSGAEVKKPGASVKVSCKASGYTFTSYWMHWVKQAPGQGLDWIGYIKPST
DNTEYNQKFKDKATLTADKSTSTAYMELSSLRSEDTAVYYCARSYGHYPLHHYWG
QGTTVTVSS
>Light Chain Combinations of P3D12 IgG histidine scanning variant #1 (SEQ ID NO: 697)
QIVLTQSPAILSLSPGERATLSCSASSSVTSNYLHWYQQKPGSSPKLLIYSTSNLASGV
PARFSGSGSGTSYTLTISSLEAEDAASYFCHQWSHYPPTFGSGTKLEIK
>Light Chain Combinations of P3D12 IgG histidine scanning variant #2 (SEQ ID NO: 698)
QIVLTQSPAILSLSPGERATLSCSASSSVTSNYLHWYQQKPGSSPKLLIYSTSNLASGV
PARFSGSGSGTSYTLTISSLEAEDAASYFCHQWSSHPPTFGSGTKLEIK
>Light Chain Combinations of P3D12 IgG histidine scanning variant #3 (SEQ ID NO: 699)
QIVLTQSPAILSLSPGERATLSCSASSSVTSNYLHWYQQKPGSSPKLLIYSTSNLASGV
PARFSGSGSGTSYTLTISSLEAEDAASYFCHQWSSYHPTFGSGTKLEIK
>Light Chain Combinations of P3D12 IgG histidine scanning variant #4 (SEQ ID NO: 700)
QIVLTQSPAILSLSPGERATLSCSASSSVTSNYLHWYQQKPGSSPKLLIYSTSNLASGV
PARFSGSGSGTSYTLTISSLEAEDAASYFCHQWSSYPHTFGSGTKLEIK
>Light Chain Combinations of P3D12 IgG histidine scanning variant #5 (SEQ ID NO: 701)
QIVLTQSPAILSLSPGERATLSCSASSSVTSNYLYWYQQKPGSSPKLLIYSTSNLASGV
PARFSGSGSGTSYTLTISSLEAEDAASYFCHQWSHHPPTFGSGTKLEIK
>Light Chain Combinations of P3D12 IgG histidine scanning variant #6 (SEQ ID NO: 702)
QIVLTQSPAILSLSPGERATLSCSASSSVTSNYLYWYQQKPGSSPKLLIYSTSNLASGV
PARFSGSGSGTSYTLTISSLEAEDAASYFCHQWSHYHPTFGSGTKLEIK
>Light Chain Combinations of P3D12 IgG histidine scanning variant #7 (SEQ ID NO: 703)
QIVLTQSPAILSLSPGERATLSCSASSSVTSNYLYWYQQKPGSSPKLLIYSTSNLASGV
PARFSGSGSGTSYTLTISSLEAEDAASYFCHQWSHYPHTFGSGTKLEIK
>Light Chain Combinations of P3D12 IgG histidine scanning variant #8 (SEQ ID NO: 704)
QIVLTQSPAILSLSPGERATLSCSASSSVTSNYLYWYQQKPGSSPKLLIYSTSNLASGV
PARFSGSGSGTSYTLTISSLEAEDAASYFCHQWSSHHPTFGSGTKLEIK
>Light Chain Combinations of P3D12 IgG histidine scanning variant #9 (SEQ ID NO: 705)
QIVLTQSPAILSLSPGERATLSCSASSSVTSNYLYWYQQKPGSSPKLLIYSTSNLASGV
PARFSGSGSGTSYTLTISSLEAEDAASYFCHQWSSHPHTFGSGTKLEIK
>Light Chain Combinations of P3D12 IgG histidine scanning variant #10 (SEQ ID NO: 706)
QIVLTQSPAILSLSPGERATLSCSASSSVTSNYLYWYQQKPGSSPKLLIYSTSNLASGV
PARFSGSGSGTSYTLTISSLEAEDAASYFCHQWSSYHHTFGSGTKLEIK
>Light Chain Combinations of P3D12 IgG histidine scanning variant #11 (SEQ ID NO: 707)
QIVLTQSPAILSLSPGERATLSCSASSSVTSNYLHWYQQKPGSSPKLLIYSTSNLASGV
PARFSGSGSGTSYTLTISSLEAEDAASYFCHQWSHHPPTFGSGTKLEIK
>Light Chain Combinations of P3D12 IgG histidine scanning variant #12 (SEQ ID NO: 708)
QIVLTQSPAILSLSPGERATLSCSASSSVTSNYLHWYQQKPGSSPKLLIYSTSNLASGV
PARFSGSGSGTSYTLTISSLEAEDAASYFCHQWSHYHPTFGSGTKLEIK
>Light Chain Combinations of P3D12 IgG histidine scanning variant #13 (SEQ ID NO: 709)
QIVLTQSPAILSLSPGERATLSCSASSSVTSNYLHWYQQKPGSSPKLLIYSTSNLASGV
PARFSGSGSGTSYTLTISSLEAEDAASYFCHQWSHYPHTFGSGTKLEIK
>Light Chain Combinations of P3D12 IgG histidine scanning variant #14 (SEQ ID NO: 710)
QIVLTQSPAILSLSPGERATLSCSASSSVTSNYLHWYQQKPGSSPKLLIYSTSNLASGV
PARFSGSGSGTSYTLTISSLEAEDAASYFCHQWSSHHPTFGSGTKLEIK
>Light Chain Combinations of P3D12 IgG histidine scanning variant #15 (SEQ ID NO: 711)
QIVLTQSPAILSLSPGERATLSCSASSSVTSNYLHWYQQKPGSSPKLLIYSTSNLASGV
PARFSGSGSGTSYTLTISSLEAEDAASYFCHQWSSHPHTFGSGTKLEIK
>Light Chain Combinations of P3D12 IgG histidine scanning variant #16 (SEQ ID NO: 712)
QIVLTQSPAILSLSPGERATLSCSASSSVTSNYLHWYQQKPGSSPKLLIYSTSNLASGV
PARFSGSGSGTSYTLTISSLEAEDAASYFCHQWSSYHHTFGSGTKLEIK
>Light Chain Combinations of P3D12 IgG histidine scanning variant #17 (SEQ ID NO: 713)
QIVLTQSPAILSLSPGERATLSCSASSSVTSNYLYWYQQKPGSSPKLLIYSTSNLASGV
PARFSGSGSGTSYTLTISSLEAEDAASYFCHQWSHHHPTFGSGTKLEIK
>Light Chain Combinations of P3D12 IgG histidine scanning variant #18 (SEQ ID NO: 714)
QIVLTQSPAILSLSPGERATLSCSASSSVTSNYLYWYQQKPGSSPKLLIYSTSNLASGV
PARFSGSGSGTSYTLTISSLEAEDAASYFCHQWSHHPHTFGSGTKLEIK
>Light Chain Combinations of P3D12 IgG histidine scanning variant #19 (SEQ ID NO: 715)
QIVLTQSPAILSLSPGERATLSCSASSSVTSNYLYWYQQKPGSSPKLLIYSTSNLASGV
PARFSGSGSGTSYTLTISSLEAEDAASYFCHQWSHYHHTFGSGTKLEIK
>Light Chain Combinations of P3D12 IgG histidine scanning variant #20 (SEQ ID NO: 716)
QIVLTQSPAILSLSPGERATLSCSASSSVTSNYLYWYQQKPGSSPKLLIYSTSNLASGV
PARFSGSGSGTSYTLTISSLEAEDAASYFCHQWSSHHHTFGSGTKLEIK
>Light Chain Combinations of P3D12 IgG histidine scanning variant #21 (SEQ ID NO: 717)
QIVLTQSPAILSLSPGERATLSCSASSSHTSNYLHWYQQKPGSSPKLLIYSTSNLASGV
PARFSGSGSGTSYTLTISSLEAEDAASYFCHQWSSYPPTFGSGTKLEIK
>Light Chain Combinations of P3D12 IgG histidine scanning variant #22 (SEQ ID NO: 718)
QIVLTQSPAILSLSPGERATLSCSASSSHTSNYLYWYQQKPGSSPKLLIYSTSNLASGV
PARFSGSGSGTSYTLTISSLEAEDAASYFCHQWSHYPPTFGSGTKLEIK
>Light Chain Combinations of P3D12 IgG histidine scanning variant #23 (SEQ ID NO: 719)
QIVLTQSPAILSLSPGERATLSCSASSSHTSNYLYWYQQKPGSSPKLLIYSTSNLASGV
PARFSGSGSGTSYTLTISSLEAEDAASYFCHQWSSHPPTFGSGTKLEIK
>Light Chain Combinations of P3D12 IgG histidine scanning variant #24 (SEQ ID NO: 720)
QIVLTQSPAILSLSPGERATLSCSASSSHTSNYLYWYQQKPGSSPKLLIYSTSNLASGV
PARFSGSGSGTSYTLTISSLEAEDAASYFCHQWSSYHPTFGSGTKLEIK
>Light Chain Combinations of P3D12 IgG histidine scanning variant #25 (SEQ ID NO: 721)
QIVLTQSPAILSLSPGERATLSCSASSSVTSHYLHWYQQKPGSSPKLLIYSTSNLASGV
PARFSGSGSGTSYTLTISSLEAEDAASYFCHQWSSYPPTFGSGTKLEIK
>Light Chain Combinations of P3D12 IgG histidine scanning variant #26 (SEQ ID NO: 722)
QIVLTQSPAILSLSPGERATLSCSASSSVTSHYLYWYQQKPGSSPKLLIYSTSNLASGV
PARFSGSGSGTSYTLTISSLEAEDAASYFCHQWSHYPPTFGSGTKLEIK
>Light Chain Combinations of P3D12 IgG histidine scanning variant #27 (SEQ ID NO: 723)
QIVLTQSPAILSLSPGERATLSCSASSSVTSHYLYWYQQKPGSSPKLLIYSTSNLASGV
PARFSGSGSGTSYTLTISSLEAEDAASYFCHQWSSHPPTFGSGTKLEIK
>Light Chain Combinations of P3D12 IgG histidine scanning variant #28 (SEQ ID NO: 724)
QIVLTQSPAILSLSPGERATLSCSASSSVTSHYLYWYQQKPGSSPKLLIYSTSNLASGV
PARFSGSGSGTSYTLTISSLEAEDAASYFCHQWSSYHPTFGSGTKLEIK
>Light Chain Combinations of P3D12 IgG histidine scanning variant #29 (SEQ ID NO: 725)
QIVLTQSPAILSLSPGERATLSCSASSSVTSNYLHWYQQKPGSSPKLLIYSTSNLASGV
PARFSGSGSGTSYTLTISSLEAEDAASYFCHQHSSYPPTFGSGTKLEIK
>Light Chain Combinations of P3D12 IgG histidine scanning variant #30 (SEQ ID NO: 726)
QIVLTQSPAILSLSPGERATLSCSASSSVTSNYLYWYQQKPGSSPKLLIYSTSNLASGV
PARFSGSGSGTSYTLTISSLEAEDAASYFCHQHSHYPPTFGSGTKLEIK
>Light Chain Combinations of P3D12 IgG histidine scanning variant #31 (SEQ ID NO: 727)
QIVLTQSPAILSLSPGERATLSCSASSSVTSNYLYWYQQKPGSSPKLLIYSTSNLASGV
PARFSGSGSGTSYTLTISSLEAEDAASYFCHQHSSHPPTFGSGTKLEIK
>Light Chain Combinations of P3D12 IgG histidine scanning variant #32 (SEQ ID NO: 728)
QIVLTQSPAILSLSPGERATLSCSASSSVTSNYLYWYQQKPGSSPKLLIYSTSNLASGV
PARFSGSGSGTSYTLTISSLEAEDAASYFCHQHSSYHPTFGSGTKLEIK
>Light Chain Combinations of P3D12 IgG histidine scanning variant #33 (SEQ ID NO: 729)
QIVLTQSPAILSLSPGERATLSCSASSSVTSNYLHWYQQKPGSSPKLLIYSTSNLASGV
PARFSGSGSGTSYTLTISSLEAEDAASYFCHQWSSYPPHFGSGTKLEIK
>Light Chain Combinations of P3D12 IgG histidine scanning variant #34 (SEQ ID NO: 730)
QIVLTQSPAILSLSPGERATLSCSASSSVTSNYLYWYQQKPGSSPKLLIYSTSNLASGV
PARFSGSGSGTSYTLTISSLEAEDAASYFCHQWSHYPPHFGSGTKLEIK
>Light Chain Combinations of P3D12 IgG histidine scanning variant #35 (SEQ ID NO: 731)
QIVLTQSPAILSLSPGERATLSCSASSSVTSNYLYWYQQKPGSSPKLLIYSTSNLASGV
PARFSGSGSGTSYTLTISSLEAEDAASYFCHQWSSHPPHFGSGTKLEIK
>Light Chain Combinations of P3D12 IgG histidine scanning variant #36 (SEQ ID NO: 732)
QIVLTQSPAILSLSPGERATLSCSASSSVTSNYLYWYQQKPGSSPKLLIYSTSNLASGV
PARFSGSGSGTSYTLTISSLEAEDAASYFCHQWSSYHPHFGSGTKLEIK
>Light Chain Combinations of P3D12 IgG histidine scanning variant #37 (SEQ ID NO: 733)
QIVLTQSPAILSLSPGERATLSCSASSSHTSHYLYWYQQKPGSSPKLLIYSTSNLASGV
PARFSGSGSGTSYTLTISSLEAEDAASYFCHQWSSYPPTFGSGTKLEIK
>Light Chain Combinations of P3D12 IgG histidine scanning variant #38 (SEQ ID NO: 734)
QIVLTQSPAILSLSPGERATLSCSASSSHTSNYLYWYQQKPGSSPKLLIYSTSNLASGV
PARFSGSGSGTSYTLTISSLEAEDAASYFCHQHSSYPPTFGSGTKLEIK
>Light Chain Combinations of P3D12 IgG histidine scanning variant #39 (SEQ ID NO: 735)
QIVLTQSPAILSLSPGERATLSCSASSSHTSNYLYWYQQKPGSSPKLLIYSTSNLASGV
PARFSGSGSGTSYTLTISSLEAEDAASYFCHQWSSYPPHFGSGTKLEIK
>Light Chain Combinations of P3D12 IgG histidine scanning variant #40 (SEQ ID NO: 736)
QIVLTQSPAILSLSPGERATLSCSASSSVTSHYLYWYQQKPGSSPKLLIYSTSNLASGV
PARFSGSGSGTSYTLTISSLEAEDAASYFCHQHSSYPPTFGSGTKLEIK
>Light Chain Combinations of P3D12 IgG histidine scanning variant #41 (SEQ ID NO: 737)
QIVLTQSPAILSLSPGERATLSCSASSSVTSHYLYWYQQKPGSSPKLLIYSTSNLASGV
PARFSGSGSGTSYTLTISSLEAEDAASYFCHQWSSYPPHFGSGTKLEIK
>Light Chain Combinations of P3D12 IgG histidine scanning variant #42 (SEQ ID NO: 738)
QIVLTQSPAILSLSPGERATLSCSASSSVTSNYLYWYQQKPGSSPKLLIYSTSNLASGV
PARFSGSGSGTSYTLTISSLEAEDAASYFCHQHSSYPPHFGSGTKLEIK
>Light Chain Combinations of P3D12 IgG histidine scanning variant #43 (SEQ ID NO: 739)
QIVLTQSPAILSLSPGERATLSCSASSSHTSHYLYWYQQKPGSSPKLLIYSTSNLASGV
PARFSGSGSGTSYTLTISSLEAEDAASYFCHQHSSYPPTFGSGTKLEIK
>Light Chain Combinations of P3D12 IgG histidine scanning variant #44 (SEQ ID NO: 740)
QIVLTQSPAILSLSPGERATLSCSASSSHTSHYLYWYQQKPGSSPKLLIYSTSNLASGV
PARFSGSGSGTSYTLTISSLEAEDAASYFCHQWSSYPPHFGSGTKLEIK
>Light Chain Combinations of P3D12 IgG histidine scanning variant #45 (SEQ ID NO: 741)
QIVLTQSPAILSLSPGERATLSCSASSSHTSNYLYWYQQKPGSSPKLLIYSTSNLASGV
PARFSGSGSGTSYTLTISSLEAEDAASYFCHQHSSYPPHFGSGTKLEIK
>Light Chain Combinations of P3D12 IgG histidine scanning variant #46 (SEQ ID NO: 742)
QIVLTQSPAILSLSPGERATLSCSASSSVTSHYLYWYQQKPGSSPKLLIYSTSNLASGV
PARFSGSGSGTSYTLTISSLEAEDAASYFCHQHSSYPPHFGSGTKLEIK
>Light Chain Combinations of P3D12 IgG histidine scanning variant #47 (SEQ ID NO: 743)
QIVLTQSPAILSLSPGERATLSCSASSSHTSHYLHWYQQKPGSSPKLLIYSTSNLASGV
PARFSGSGSGTSYTLTISSLEAEDAASYFCHQWSSYPPTFGSGTKLEIK
>Light Chain Combinations of P3D12 IgG histidine scanning variant #48 (SEQ ID NO: 744)
QIVLTQSPAILSLSPGERATLSCSASSSHTSNYLHWYQQKPGSSPKLLIYSTSNLASGV
PARFSGSGSGTSYTLTISSLEAEDAASYFCHQHSSYPPTFGSGTKLEIK
>Light Chain Combinations of P3D12 IgG histidine scanning variant #49 (SEQ ID NO: 745)
QIVLTQSPAILSLSPGERATLSCSASSSHTSNYLHWYQQKPGSSPKLLIYSTSNLASGV
PARFSGSGSGTSYTLTISSLEAEDAASYFCHQWSSYPPHFGSGTKLEIK
>Light Chain Combinations of P3D12 IgG histidine scanning variant #50 (SEQ ID NO: 746)
QIVLTQSPAILSLSPGERATLSCSASSSVTSHYLHWYQQKPGSSPKLLIYSTSNLASGV
PARFSGSGSGTSYTLTISSLEAEDAASYFCHQHSSYPPTFGSGTKLEIK
>Light Chain Combinations of P3D12 IgG histidine scanning variant #51 (SEQ ID NO: 747)
QIVLTQSPAILSLSPGERATLSCSASSSVTSHYLHWYQQKPGSSPKLLIYSTSNLASGV
PARFSGSGSGTSYTLTISSLEAEDAASYFCHQWSSYPPHFGSGTKLEIK
>Light Chain Combinations of P3D12 IgG histidine scanning variant #52 (SEQ ID NO: 748)
QIVLTQSPAILSLSPGERATLSCSASSSVTSNYLHWYQQKPGSSPKLLIYSTSNLASGV
PARFSGSGSGTSYTLTISSLEAEDAASYFCHQHSSYPPHFGSGTKLEIK
>Light Chain Combinations of P3D12 IgG histidine scanning variant #53 (SEQ ID NO: 749)
QIVLTQSPAILSLSPGERATLSCSASSSHTSHYLYWYQQKPGSSPKLLIYSTSNLASGV
PARFSGSGSGTSYTLTISSLEAEDAASYFCHQWSHYPPTFGSGTKLEIK
>Light Chain Combinations of P3D12 IgG histidine scanning variant #54 (SEQ ID NO: 750)
QIVLTQSPAILSLSPGERATLSCSASSSHTSNYLYWYQQKPGSSPKLLIYSTSNLASGV
PARFSGSGSGTSYTLTISSLEAEDAASYFCHQHSHYPPTFGSGTKLEIK
>Light Chain Combinations of P3D12 IgG histidine scanning variant #55 (SEQ ID NO: 751)
QIVLTQSPAILSLSPGERATLSCSASSSHTSNYLYWYQQKPGSSPKLLIYSTSNLASGV
PARFSGSGSGTSYTLTISSLEAEDAASYFCHQWSHYPPHFGSGTKLEIK
>Light Chain Combinations of P3D12 IgG histidine scanning variant #56 (SEQ ID NO: 752)
QIVLTQSPAILSLSPGERATLSCSASSSVTSHYLYWYQQKPGSSPKLLIYSTSNLASGV
PARFSGSGSGTSYTLTISSLEAEDAASYFCHQHSHYPPTFGSGTKLEIK
>Light Chain Combinations of P3D12 IgG histidine scanning variant #57 (SEQ ID NO: 753)
QIVLTQSPAILSLSPGERATLSCSASSSVTSHYLYWYQQKPGSSPKLLIYSTSNLASGV
PARFSGSGSGTSYTLTISSLEAEDAASYFCHQWSHYPPHFGSGTKLEIK
>Light Chain Combinations of P3D12 IgG histidine scanning variant #58 (SEQ ID NO: 754)
QIVLTQSPAILSLSPGERATLSCSASSSVTSNYLYWYQQKPGSSPKLLIYSTSNLASGV
PARFSGSGSGTSYTLTISSLEAEDAASYFCHQHSHYPPHFGSGTKLEIK
>Light Chain Combinations of P3D12 IgG histidine scanning variant #59 (SEQ ID NO: 755)
QIVLTQSPAILSLSPGERATLSCSASSSHTSHYLYWYQQKPGSSPKLLIYSTSNLASGV
PARFSGSGSGTSYTLTISSLEAEDAASYFCHQWSSHPPTFGSGTKLEIK
>Light Chain Combinations of P3D12 IgG histidine scanning variant #60 (SEQ ID NO: 756)
QIVLTQSPAILSLSPGERATLSCSASSSHTSNYLYWYQQKPGSSPKLLIYSTSNLASGV
PARFSGSGSGTSYTLTISSLEAEDAASYFCHQHSSHPPTFGSGTKLEIK
>Light Chain Combinations of P3D12 IgG histidine scanning variant #61 (SEQ ID NO: 757)
QIVLTQSPAILSLSPGERATLSCSASSSHTSNYLYWYQQKPGSSPKLLIYSTSNLASGV
PARFSGSGSGTSYTLTISSLEAEDAASYFCHQWSSHPPHFGSGTKLEIK
>Light Chain Combinations of P3D12 IgG histidine scanning variant #62 (SEQ ID NO: 758)
QIVLTQSPAILSLSPGERATLSCSASSSVTSHYLYWYQQKPGSSPKLLIYSTSNLASGV
PARFSGSGSGTSYTLTISSLEAEDAASYFCHQHSSHPPTFGSGTKLEIK
>Light Chain Combinations of P3D12 IgG histidine scanning variant #63 (SEQ ID NO: 759)
QIVLTQSPAILSLSPGERATLSCSASSSVTSHYLYWYQQKPGSSPKLLIYSTSNLASGV
PARFSGSGSGTSYTLTISSLEAEDAASYFCHQWSSHPPHFGSGTKLEIK
>Light Chain Combinations of P3D12 IgG histidine scanning variant #64 (SEQ ID NO: 760)
QIVLTQSPAILSLSPGERATLSCSASSSVTSNYLYWYQQKPGSSPKLLIYSTSNLASGV
PARFSGSGSGTSYTLTISSLEAEDAASYFCHQHSSHPPHFGSGTKLEIK
>Light Chain Combinations of P3D12 IgG histidine scanning variant #65 (SEQ ID NO: 761)
QIVLTQSPAILSLSPGERATLSCSASSSHTSHYLYWYQQKPGSSPKLLIYSTSNLASGV
PARFSGSGSGTSYTLTISSLEAEDAASYFCHQWSSYHPTFGSGTKLEIK
>Light Chain Combinations of P3D12 IgG histidine scanning variant #66 (SEQ ID NO: 762)
QIVLTQSPAILSLSPGERATLSCSASSSHTSNYLYWYQQKPGSSPKLLIYSTSNLASGV
PARFSGSGSGTSYTLTISSLEAEDAASYFCHQHSSYHPTFGSGTKLEIK
>Light Chain Combinations of P3D12 IgG histidine scanning variant #67 (SEQ ID NO: 763)
QIVLTQSPAILSLSPGERATLSCSASSSHTSNYLYWYQQKPGSSPKLLIYSTSNLASGV
PARFSGSGSGTSYTLTISSLEAEDAASYFCHQWSSYHPHFGSGTKLEIK
>Light Chain Combinations of P3D12 IgG histidine scanning variant #68 (SEQ ID NO: 764)
QIVLTQSPAILSLSPGERATLSCSASSSVTSHYLYWYQQKPGSSPKLLIYSTSNLASGV
PARFSGSGSGTSYTLTISSLEAEDAASYFCHQHSSYHPTFGSGTKLEIK
>Light Chain Combinations of P3D12 IgG histidine scanning variant #69 (SEQ ID NO: 765)
QIVLTQSPAILSLSPGERATLSCSASSSVTSHYLYWYQQKPGSSPKLLIYSTSNLASGV
PARFSGSGSGTSYTLTISSLEAEDAASYFCHQWSSYHPHFGSGTKLEIK
>Light Chain Combinations of P3D12 IgG histidine scanning variant #70 (SEQ ID NO: 766)
QIVLTQSPAILSLSPGERATLSCSASSSVTSNYLYWYQQKPGSSPKLLIYSTSNLASGV
PARFSGSGSGTSYTLTISSLEAEDAASYFCHQHSSYHPHFGSGTKLEIK
>Light Chain Combinations of P3D12 IgG histidine scanning variant #71 (SEQ ID NO: 767)
QIVLTQSPAILSLSPGERATLSCSASSSHTSNYLHWYQQKPGSSPKLLIYSTSNLASGV
PARFSGSGSGTSYTLTISSLEAEDAASYFCHQWSHYPPTFGSGTKLEIK
>Light Chain Combinations of P3D12 IgG histidine scanning variant #72 (SEQ ID NO: 768)
QIVLTQSPAILSLSPGERATLSCSASSSHTSNYLHWYQQKPGSSPKLLIYSTSNLASGV
PARFSGSGSGTSYTLTISSLEAEDAASYFCHQWSSHPPTFGSGTKLEIK
>Light Chain Combinations of P3D12 IgG histidine scanning variant #73 (SEQ ID NO: 769)
QIVLTQSPAILSLSPGERATLSCSASSSHTSNYLHWYQQKPGSSPKLLIYSTSNLASGV
PARFSGSGSGTSYTLTISSLEAEDAASYFCHQWSSYHPTFGSGTKLEIK
>Light Chain Combinations of P3D12 IgG histidine scanning variant #74 (SEQ ID NO: 770)
QIVLTQSPAILSLSPGERATLSCSASSSHTSNYLYWYQQKPGSSPKLLIYSTSNLASGV
PARFSGSGSGTSYTLTISSLEAEDAASYFCHQWSHHPPTFGSGTKLEIK
>Light Chain Combinations of P3D12 IgG histidine scanning variant #75 (SEQ ID NO: 771)
QIVLTQSPAILSLSPGERATLSCSASSSHTSNYLYWYQQKPGSSPKLLIYSTSNLASGV
PARFSGSGSGTSYTLTISSLEAEDAASYFCHQWSHYHPTFGSGTKLEIK
>Light Chain Combinations of P3D12 IgG histidine scanning variant #76 (SEQ ID NO: 772)
QIVLTQSPAILSLSPGERATLSCSASSSHTSNYLYWYQQKPGSSPKLLIYSTSNLASGV
PARFSGSGSGTSYTLTISSLEAEDAASYFCHQWSSHHPTFGSGTKLEIK
>Light Chain Combinations of P3D12 IgG histidine scanning variant #77 (SEQ ID NO: 773)
QIVLTQSPAILSLSPGERATLSCSASSSVTSHYLHWYQQKPGSSPKLLIYSTSNLASGV
PARFSGSGSGTSYTLTISSLEAEDAASYFCHQWSHYPPTFGSGTKLEIK
>Light Chain Combinations of P3D12 IgG histidine scanning variant #78 (SEQ ID NO: 774)
QIVLTQSPAILSLSPGERATLSCSASSSVTSHYLHWYQQKPGSSPKLLIYSTSNLASGV
PARFSGSGSGTSYTLTISSLEAEDAASYFCHQWSSHPPTFGSGTKLEIK
>Light Chain Combinations of P3D12 IgG histidine scanning variant #79 (SEQ ID NO: 775)
QIVLTQSPAILSLSPGERATLSCSASSSVTSHYLHWYQQKPGSSPKLLIYSTSNLASGV
PARFSGSGSGTSYTLTISSLEAEDAASYFCHQWSSYHPTFGSGTKLEIK
>Light Chain Combinations of P3D12 IgG histidine scanning variant #80 (SEQ ID NO: 776)
QIVLTQSPAILSLSPGERATLSCSASSSVTSHYLYWYQQKPGSSPKLLIYSTSNLASGV
PARFSGSGSGTSYTLTISSLEAEDAASYFCHQWSHHPPTFGSGTKLEIK
>Light Chain Combinations of P3D12 IgG histidine scanning variant #81 (SEQ ID NO: 777)
QIVLTQSPAILSLSPGERATLSCSASSSVTSHYLYWYQQKPGSSPKLLIYSTSNLASGV
PARFSGSGSGTSYTLTISSLEAEDAASYFCHQWSHYHPTFGSGTKLEIK
>Light Chain Combinations of P3D12 IgG histidine scanning variant #82 (SEQ ID NO: 778)
QIVLTQSPAILSLSPGERATLSCSASSSVTSHYLYWYQQKPGSSPKLLIYSTSNLASGV
PARFSGSGSGTSYTLTISSLEAEDAASYFCHQWSSHHPTFGSGTKLEIK
>Light Chain Combinations of P3D12 IgG histidine scanning variant #83 (SEQ ID NO: 779)
QIVLTQSPAILSLSPGERATLSCSASSSVTSNYLHWYQQKPGSSPKLLIYSTSNLASGV
PARFSGSGSGTSYTLTISSLEAEDAASYFCHQHSHYPPTFGSGTKLEIK
>Light Chain Combinations of P3D12 IgG histidine scanning variant #84 (SEQ ID NO: 780)
QIVLTQSPAILSLSPGERATLSCSASSSVTSNYLHWYQQKPGSSPKLLIYSTSNLASGV
PARFSGSGSGTSYTLTISSLEAEDAASYFCHQHSSHPPTFGSGTKLEIK
>Light Chain Combinations of P3D12 IgG histidine scanning variant #85 (SEQ ID NO: 781)
QIVLTQSPAILSLSPGERATLSCSASSSVTSNYLHWYQQKPGSSPKLLIYSTSNLASGV
PARFSGSGSGTSYTLTISSLEAEDAASYFCHQHSSYHPTFGSGTKLEIK
>Light Chain Combinations of P3D12 IgG histidine scanning variant #86 (SEQ ID NO: 782)
QIVLTQSPAILSLSPGERATLSCSASSSVTSNYLYWYQQKPGSSPKLLIYSTSNLASGV
PARFSGSGSGTSYTLTISSLEAEDAASYFCHQHSHHPPTFGSGTKLEIK
>Light Chain Combinations of P3D12 IgG histidine scanning variant #87 (SEQ ID NO: 783)
QIVLTQSPAILSLSPGERATLSCSASSSVTSNYLYWYQQKPGSSPKLLIYSTSNLASGV
PARFSGSGSGTSYTLTISSLEAEDAASYFCHQHSHYHPTFGSGTKLEIK
>Light Chain Combinations of P3D12 IgG histidine scanning variant #88 (SEQ ID NO: 784)
QIVLTQSPAILSLSPGERATLSCSASSSVTSNYLYWYQQKPGSSPKLLIYSTSNLASGV
PARFSGSGSGTSYTLTISSLEAEDAASYFCHQHSSHHPTFGSGTKLEIK
>Light Chain Combinations of P3D12 IgG histidine scanning variant #89 (SEQ ID NO: 785)
QIVLTQSPAILSLSPGERATLSCSASSSVTSNYLHWYQQKPGSSPKLLIYSTSNLASGV
PARFSGSGSGTSYTLTISSLEAEDAASYFCHQWSHYPPHFGSGTKLEIK
>Light Chain Combinations of P3D12 IgG histidine scanning variant #90 (SEQ ID NO: 786)
QIVLTQSPAILSLSPGERATLSCSASSSVTSNYLHWYQQKPGSSPKLLIYSTSNLASGV
PARFSGSGSGTSYTLTISSLEAEDAASYFCHQWSSHPPHFGSGTKLEIK
>Light Chain Combinations of P3D12 IgG histidine scanning variant #91 (SEQ ID NO: 787)
QIVLTQSPAILSLSPGERATLSCSASSSVTSNYLHWYQQKPGSSPKLLIYSTSNLASGV
PARFSGSGSGTSYTLTISSLEAEDAASYFCHQWSSYHPHFGSGTKLEIK
>Light Chain Combinations of P3D12 IgG histidine scanning variant #92 (SEQ ID NO: 788)
QIVLTQSPAILSLSPGERATLSCSASSSVTSNYLYWYQQKPGSSPKLLIYSTSNLASGV
PARFSGSGSGTSYTLTISSLEAEDAASYFCHQWSHHPPHFGSGTKLEIK
>Light Chain Combinations of P3D12 IgG histidine scanning variant #93 (SEQ ID NO: 789)
QIVLTQSPAILSLSPGERATLSCSASSSVTSNYLYWYQQKPGSSPKLLIYSTSNLASGV
PARFSGSGSGTSYTLTISSLEAEDAASYFCHQWSHYHPHFGSGTKLEIK
>Light Chain Combinations of P3D12 IgG histidine scanning variant #94 (SEQ ID NO: 790)
QIVLTQSPAILSLSPGERATLSCSASSSVTSNYLYWYQQKPGSSPKLLIYSTSNLASGV
PARFSGSGSGTSYTLTISSLEAEDAASYFCHQWSSHHPHFGSGTKLEIK

The application's sequence listing, which the Patent Office published only in electronic form, follows.

SEQUENCE LISTING (790 sequences)

SEQ ID NO: 1 - protein, 118 aa, Artificial Sequence
  source: /note="Description of Artificial Sequence: Synthetic polypeptide"
  source: /note="Heavy Chain of Telisotuzumab IgG"
QVQLVQSGAEVKKPGASVKVSCKASGYIFTAYTMHWVRQAPGQGLEWMGWIKPNNGLANYAQKFQGRVTMTRDTSISTAYMELSRLRSDDTAVYYCARSEITTEFDYWGQGTLVTVSS

SEQ ID NO: 2 - protein, 111 aa, Artificial Sequence
  source: /note="Description of Artificial Sequence: Synthetic polypeptide"
  source: /note="Light Chain of Telisotuzumab IgG"
DIVMTQSPDSLAVSLGERATINCKSSESVDSYANSFLHWYQQKPGQPPKLLIYRASTRESGVPDRFSGSGSGTDFTLTISSLQAEDVAVYYCQQSKEDPLTFGGGTKVEIK

SEQ ID NO: 3 - protein, 10 aa, Artificial Sequence
  source: /note="Description of Artificial Sequence: Synthetic peptide"
  source: /note="Heavy Chain CDR1 of Telisotuzumab"
GYIFTAYTMH

SEQ ID NO: 4 - protein, 17 aa, Artificial Sequence
  source: /note="Description of Artificial Sequence: Synthetic peptide"
  source: /note="Heavy Chain CDR2 of Telisotuzumab"
WIKPNNGLANYAQKFQG

SEQ ID NO: 5 - protein, 11 aa, Artificial Sequence
  source: /note="Description of Artificial Sequence: Synthetic peptide"
  source: /note="Heavy Chain CDR3 of Telisotuzumab"
ARSEITTEFDY

SEQ ID NO: 6 - protein, 15 aa, Artificial Sequence
  source: /note="Description of Artificial Sequence: Synthetic peptide"
  source: /note="Light Chain CDR1 of Telisotuzumab"
KSSESVDSYANSFLH

SEQ ID NO: 7 - protein, 7 aa, Artificial Sequence
  source: /note="Description of Artificial Sequence: Synthetic peptide"
  source: /note="Light Chain CDR2 of Telisotuzumab"
RASTRES

SEQ ID NO: 8 - protein, 9 aa, Artificial Sequence
  source: /note="Description of Artificial Sequence: Synthetic peptide"
  source: /note="Light Chain CDR3 of Telisotuzumab"
QQSKEDPLT

SEQ ID NO: 9 - protein, 1366 aa, Homo sapiens
  source: /note="Mature Human MET"
ECKEALAKSEMNVNMKYQLPNFTAETPIQNVILHEHHIFLGATNYIYVLNEEDLQKVAEYKTGPVLEHPDCFPCQDCSSKANLSGGVWKDNINMALVVDTYYDDQLISCGSVNRGTCQRHVFPHNHTADIQSEVHCIFSPQIEEPSQCPDCVVSALGAKVLSSVKDRFINFFVGNTINSSYFPDHPLHSISVRRLKETKDGFMFLTDQSYIDVLPEFRDSYPIKYVHAFESNNFIYFLTVQRETLDAQTFHTRIIRFCSINSGLHSYMEMPLECILTEKRKKRSTKKEVFNILQAAYVSKPGAQLARQIGASLNDDILFGVFAQSKPDSAEPMDRSAMCAFPIKYVNDFFNKIVNKNNVRCLQHFYGPNHEHCFNRTLLRNSSGCEARRDEYRTEFTTALQRVDLFMGQFSEVLLTSISTFIKGDLTIANLGTSEGRFMQVVVSRSGPSTPHVNFLLDSHPVSPEVIVEHTLNQNGYTLVITGKKITKIPLNGLGCRHFQSCSQCLSAPPFVQCGWCHDKCVRSEECLSGTWTQQICLPAIYKVFPNSAPLEGGTRLTICGWDFGFRRNNKFDLKKTRVLLGNESCTLTLSESTMNTLKCTVGPAMNKHFNMSIIISNGHGTTQYSTFSYVDPVITSISPKYGPMAGGTLLTLTGNYLNSGNSRHISIGGKTCTLKSVSNSILECYTPAQTISTEFAVKLKIDLANRETSIFSYREDPIVYEIHPTKSFISGGSTITGVGKNLNSVSVPRMVINVHEAGRNFTVACQHRSNSEIICCTTPSLQQLNLQLPLKTKAFFMLDGILSKYFDLIYVHNPVFKPFEKPVMISMGNENVLEIKGNDIDPEAVKGEVLKVGNKSCENIHLHSEAVLCTVPNDLLKLNSELNIEWKQAISSTVLGKVIVQPDQNFTGLIAGVVSISTALLLLLGFFLWLKKRKQIKDLGSELVRYDARVHTPHLDRLVSARSVSPTTEMVSNESVDYRATFPEDQFPNSSQNGSCRQVQYPLTDMSPILTSGDSDISSPLLQNTVHIDLSALNPELVQAVQHVVIGPSSLIVHFNEVIGRGHFGCVYHGTLLDNDGKKIHCAVKSLNRITDIGEVSQFLTEGIIMKDFSHPNVLSLLGICLRSEGSPLVVLPYMKHGDLRNFIRNETHNPTVKDLIGFGLQVAKGMKYLASKKFVHRDLAARNCMLDEKFTVKVADFGLARDMYDKEYYSVHNKTGAKLPVKWMALESLQTQKFTTKSDVWSFGVLLWELMTRGAPPYPDVNTFDITVYLLQGRRLLQPEYCPDPLYEVMLKCWHPKAEMRPSFSELVSRISAIFSTFIGEHYVHVNATYVNVKCVAPYPSLLSSEDNADDEVDTRPASFWETS

SEQ ID NO: 10 - DNA, 4098 bp, Homo sapiens
  source: /note="cDNA Encoding Mature Human MET"
gagtgtaaagaggcactagcaaagtccgagatgaatgtgaatatgaagtatcagcttcccaacttcaccgcggaaacacccatccagaatgtcattctacatgagcatcacattttccttggtgccactaactacatttatgttttaaatgaggaagaccttcagaaggttgctgagtacaagactgggcctgtgctggaacacccagattgtttcccatgtcaggactgcagcagcaaagccaatttatcaggaggtgtttggaaagataacatcaacatggctctagttgtcgacacctactatgatgatcaactcattagctgtggcagcgtcaacagagggacctgccagcgacatgtctttccccacaatcatactgctgacatacagtcggaggttcactgcatattctccccacagatagaagagcccagccagtgtcctgactgtgtggtgagcgccctgggagccaaagtcctttcatctgtaaaggaccggttcatcaacttctttgtaggcaataccataaattcttcttatttcccagatcatccattgcattcgatatcagtgagaaggctaaaggaaacgaaagatggttttatgtttttgacggaccagtcctacattgatgttttacctgagttcagagattcttaccccattaagtatgtccatgcctttgaaagcaacaattttatttacttcttgacggtccaaagggaaactctagatgctcagacttttcacacaagaataatcaggttctgttccataaactctggattgcattcctacatggaaatgcctctggagtgtattctcacagaaaagagaaaaaagagatccacaaagaaggaagtgtttaatatacttcaggctgcgtatgtcagcaagcctggggcccagcttgctagacaaataggagccagcctgaatgatgacattcttttcggggtgttcgcacaaagcaagccagattctgccgaaccaatggatcgatctgccatgtgtgcattccctatcaaatatgtcaacgacttcttcaacaagatcgtcaacaaaaacaatgtgagatgtctccagcatttttacggacccaatcatgagcactgctttaataggacacttctgagaaattcatcaggctgtgaagcgcgccgtgatgaatatcgaacagagtttaccacagctttgcagcgcgttgacttattcatgggtcaattcagcgaagtcctcttaacatctatatccaccttcattaaaggagacctcaccatagctaatcttgggacatcagagggtcgcttcatgcaggttgtggtttctcgatcaggaccatcaacccctcatgtgaattttctcctggactcccatccagtgtctccagaagtgattgtggagcatacattaaaccaaaatggctacacactggttatcactgggaagaagatcacgaagatcccattgaatggcttgggctgcagacatttccagtcctgcagtcaatgcctctctgccccaccctttgttcagtgtggctggtgccacgacaaatgtgtgcgatcggaggaatgcctgagcgggacatggactcaacagatctgtctgcctgcaatctacaaggttttcccaaatagtgcaccccttgaaggagggacaaggctgaccatatgtggctgggactttggatttcggaggaataataaatttgatttaaagaaaactagagttctccttggaaatgagagctgcaccttgactttaagtgagagcacgatgaatacattgaaatgcacagttggtcctgccatgaataagcatttcaatatgtccataattatttcaaatggccacgggacaacacaatacagtacattctcctatgtggatcctgtaataacaagtatttcgccgaaatacggtcctatggctggtggcactttacttactttaactggaaattacctaaacagtgggaattctagacacatttcaattggtggaaaaacatgtactttaaaaagtgtgtcaaacagtattcttgaatgttataccccagcccaaaccatttcaactgagtttgctgttaaattgaaaattgacttagccaaccgagagacaagcatcttcagttaccgtgaagatcccattgtctatgaaattcatccaaccaaatcttttattagtggtgggagcacaataacaggtgttgggaaaaacctgaattcagttagtgtcccgagaatggtcataaatgtgcatgaagcaggaaggaactttacagtggcatgtcaacatcgctctaattcagagataatctgttgtaccactccttccctgcaacagctgaatctgcaactccccctgaaaaccaaagcctttttcatgttagatgggatcctttccaaatactttgatctcatttatgtacataatcctgtgtttaagccttttgaaaagccagtgatgatctcaatgggcaatgaaaatgtactggaaattaagggaaatgatattgaccctgaagcagttaaaggtgaagtgttaaaagttggaaataagagctgtgagaatatacacttacattctgaagccgttttatgcacggtccccaatgacctgctgaaattgaacagcgagctaaatatagagtggaagcaagcaatttcttcaaccgtccttggaaaagtaatagttcaaccagatcagaatttcacaggattgattgctggtgttgtctcaatatcaacagcactgttattactacttgggtttttcctgtggctgaaaaagagaaagcaaattaaagatctgggcagtgaattagttcgctacgatgcaagagtacacactcctcatttggataggcttgtaagtgcccgaagtgtaagcccaactacagaaatggtttcaaatgaatctgtagactaccgagctacttttccagaagatcagtttcctaattcatctcagaacggttcatgccgacaagtgcagtatcctctgacagacatgtcccccatcctaactagtggggactctgatatatccagtccattactgcaaaatactgtccacattgacctcagtgctctaaatccagagctggtccaggcagtgcagcatgtagtgattgggcccagtagcctgattgtgcatttcaatgaagtcataggaagagggcattttggttgtgtatatcatgggactttgttggacaatgatggcaagaaaattcactgtgctgtgaaatccttgaacagaatcactgacataggagaagtttcccaatttctgaccgagggaatcatcatgaaagattttagtcatcccaatgtcctctcgctcctgggaatctgcctgcgaagtgaagggtctccgctggtggtcctaccatacatgaaacatggagatcttcgaaatttcattcgaaatgagactcataatccaactgtaaaagatcttattggctttggtcttcaagtagccaaaggcatgaaatatcttgcaagcaaaaagtttgtccacagagacttggctgcaagaaactgtatgctggatgaaaaattcacagtcaaggttgctgattttggtcttgccagagacatgtatgataaagaatactatagtgtacacaacaaaacaggtgcaaagctgccagtgaagtggatggctttggaaagtctgcaaactcaaaagtttaccaccaagtcagatgtgtggtcctttggcgtgctcctctgggagctgatgacaagaggagccccaccttatcctgacgtaaacacctttgatataactgtttacttgttgcaagggagaagactcctacaacccgaatactgcccagaccccttatatgaagtaatgctaaaatgctggcaccctaaagccgaaatgcgcccatccttttctgaactggtgtcccggatatcagcgatcttctctactttcattggggagcactatgtccatgtgaacgctacttatgtgaacgtaaaatgtgtcgctccgtatccttctctgttgtcatcagaagataacgctgatgatgaggtggacacacgaccagcctccttctgggagacatca

SEQ ID NO: 11 - protein, 908 aa, Homo sapiens
  source: /note="Extracellular Domain of MET"
ECKEALAKSEMNVNMKYQLPNFTAETPIQNVILHEHHIFLGATNYIYVLNEEDLQKVAEYKTGPVLEHPDCFPCQDCSSKANLSGGVWKDNINMALVVDTYYDDQLISCGSVNRGTCQRHVFPHNHTADIQSEVHCIFSPQIEEPSQCPDCVVSALGAKVLSSVKDRFINFFVGNTINSSYFPDHPLHSISVRRLKETKDGFMFLTDQSYIDVLPEFRDSYPIKYVHAFESNNFIYFLTVQRETLDAQTFHTRIIRFCSINSGLHSYMEMPLECILTEKRKKRSTKKEVFNILQAAYVSKPGAQLARQIGASLNDDILFGVFAQSKPDSAEPMDRSAMCAFPIKYVNDFFNKIVNKNNVRCLQHFYGPNHEHCFNRTLLRNSSGCEARRDEYRTEFTTALQRVDLFMGQFSEVLLTSISTFIKGDLTIANLGTSEGRFMQVVVSRSGPSTPHVNFLLDSHPVSPEVIVEHTLNQNGYTLVITGKKITKIPLNGLGCRHFQSCSQCLSAPPFVQCGWCHDKCVRSEECLSGTWTQQICLPAIYKVFPNSAPLEGGTRLTICGWDFGFRRNNKFDLKKTRVLLGNESCTLTLSESTMNTLKCTVGPAMNKHFNMSIIISNGHGTTQYSTFSYVDPVITSISPKYGPMAGGTLLTLTGNYLNSGNSRHISIGGKTCTLKSVSNSILECYTPAQTISTEFAVKLKIDLANRETSIFSYREDPIVYEIHPTKSFISGGSTITGVGKNLNSVSVPRMVINVHEAGRNFTVACQHRSNSEIICCTTPSLQQLNLQLPLKTKAFFMLDGILSKYFDLIYVHNPVFKPFEKPVMISMGNENVLEIKGNDIDPEAVKGEVLKVGNKSCENIHLHSEAVLCTVPNDLLKLNSELNIEWKQAISSTVLGKVIVQPDQNFT

SEQ ID NO: 12 - DNA, 2724 bp, Homo sapiens
  source: /note="cDNA Encoding Extracellular Domain of MET"
gagtgtaaagaggcactagcaaagtccgagatgaatgtgaatatgaagtatcagcttcccaacttcaccgcggaaacacccatccagaatgtcattctacatgagcatcacattttccttggtgccactaactacatttatgttttaaatgaggaagaccttcagaaggttgctgagtacaagactgggcctgtgctggaacacccagattgtttcccatgtcaggactgcagcagcaaagccaatttatcaggaggtgtttggaaagataacatcaacatggctctagttgtcgacacctactatgatgatcaactcattagctgtggcagcgtcaacagagggacctgccagcgacatgtctttccccacaatcatactgctgacatacagtcggaggttcactgcatattctccccacagatagaagagcccagccagtgtcctgactgtgtggtgagcgccctgggagccaaagtcctttcatctgtaaaggaccggttcatcaacttctttgtaggcaataccataaattcttcttatttcccagatcatccattgcattcgatatcagtgagaaggctaaaggaaacgaaagatggttttatgtttttgacggaccagtcctacattgatgttttacctgagttcagagattcttaccccattaagtatgtccatgcctttgaaagcaacaattttatttacttcttgacggtccaaagggaaactctagatgctcagacttttcacacaagaataatcaggttctgttccataaactctggattgcattcctacatggaaatgcctctggagtgtattctcacagaaaagagaaaaaagagatccacaaagaaggaagtgtttaatatacttcaggctgcgtatgtcagcaagcctggggcccagcttgctagacaaataggagccagcctgaatgatgacattcttttcggggtgttcgcacaaagcaagccagattctgccgaaccaatggatcgatctgccatgtgtgcattccctatcaaatatgtcaacgacttcttcaacaagatcgtcaacaaaaacaatgtgagatgtctccagcatttttacggacccaatcatgagcactgctttaataggacacttctgagaaattcatcaggctgtgaagcgcgccgtgatgaatatcgaacagagtttaccacagctttgcagcgcgttgacttattcatgggtcaattcagcgaagtcctcttaacatctatatccaccttcattaaaggagacctcaccatagctaatcttgggacatcagagggtcgcttcatgcaggttgtggtttctcgatcaggaccatcaacccctcatgtgaattttctcctggactcccatccagtgtctccagaagtgattgtggagcatacattaaaccaaaatggctacacactggttatcactgggaagaagatcacgaagatcccattgaatggcttgggctgcagacatttccagtcctgcagtcaatgcctctctgccccaccctttgttcagtgtggctggtgccacgacaaatgtgtgcgatcggaggaatgcctgagcgggacatggactcaacagatctgtctgcctgcaatctacaaggttttcccaaatagtgcaccccttgaaggagggacaaggctgaccatatgtggctgggactttggatttcggaggaataataaatttgatttaaagaaaactagagttctccttggaaatgagagctgcaccttgactttaagtgagagcacgatgaatacattgaaatgcacagttggtcctgccatgaataagcatttcaatatgtccataattatttcaaatggccacgggacaacacaatacagtacattctcctatgtggatcctgtaataacaagtatttcgccgaaatacggtcctatggctggtggcactttacttactttaactggaaattacctaaacagtgggaattctagacacatttcaattggtggaaaaacatgtactttaaaaagtgtgtcaaacagtattcttgaatgttataccccagcccaaaccatttcaactgagtttgctgttaaattgaaaattgacttagccaaccgagagacaagcatcttcagttaccgtgaagatcccattgtctatgaaattcatccaaccaaatcttttattagtggtgggagcacaataacaggtgttgggaaaaacctgaattcagttagtgtcccgagaatggtcataaatgtgcatgaagcaggaaggaactttacagtggcatgtcaacatcgctctaattcagagataatctgttgtaccactccttccctgcaacagctgaatctgcaactccccctgaaaaccaaagcctttttcatgttagatgggatcctttccaaatactttgatctcatttatgtacataatcctgtgtttaagccttttgaaaagccagtgatgatctcaatgggcaatgaaaatgtactggaaattaagggaaatgatattgaccctgaagcagttaaaggtgaagtgttaaaagttggaaataagagctgtgagaatatacacttacattctgaagccgttttatgcacggtccccaatgacctgctgaaattgaacagcgagctaaatatagagtggaagcaagcaatttcttcaaccgtccttggaaaagtaatagttcaaccagatcagaatttcaca

SEQ ID NO: 13 - protein, 118 aa, Artificial Sequence
  source: /note="Description of Artificial Sequence: Synthetic polypeptide"
  source: /note="Heavy Chain of Telisotuzumab IgG histidine scanning variant #1"
QVQLVQSGAEVKKPGASVKVSCKASHYIFTAYTMHWVRQAPGQGLEWMGWIKPNNGLANYAQKFQGRVTMTRDTSISTAYMELSRLRSDDTAVYYCARSEITTEFDYWGQGTLVTVSS

SEQ ID NO: 14 - protein, 118 aa, Artificial Sequence
  source: /note="Description of Artificial Sequence: Synthetic polypeptide"
  source: /note="Heavy Chain of Telisotuzumab IgG histidine scanning variant #2"
QVQLVQSGAEVKKPGASVKVSCKASGHIFTAYTMHWVRQAPGQGLEWMGWIKPNNGLANYAQKFQGRVTMTRDTSISTAYMELSRLRSDDTAVYYCARSEITTEFDYWGQGTLVTVSS

SEQ ID NO: 15 - protein, 118 aa, Artificial Sequence
  source: /note="Description of Artificial Sequence: Synthetic polypeptide"
  source: /note="Heavy Chain of Telisotuzumab IgG histidine scanning variant #3"
QVQLVQSGAEVKKPGASVKVSCKASGYHFTAYTMHWVRQAPGQGLEWMGWIKPNNGLANYAQKFQGRVTMTRDTSISTAYMELSRLRSDDTAVYYCARSEITTEFDYWGQGTLVTVSS

SEQ ID NO: 16 - protein, 118 aa, Artificial Sequence
  source: /note="Description of Artificial Sequence: Synthetic polypeptide"
  source: /note="Heavy Chain of Telisotuzumab IgG histidine scanning variant #4"
QVQLVQSGAEVKKPGASVKVSCKASGYIHTAYTMHWVRQAPGQGLEWMGWIKPNNGLANYAQKFQGRVTMTRDTSISTAYMELSRLRSDDTAVYYCARSEITTEFDYWGQGTLVTVSS

SEQ ID NO: 17 - protein, 118 aa, Artificial Sequence
  source: /note="Description of Artificial Sequence: Synthetic polypeptide"
  source: /note="Heavy Chain of Telisotuzumab IgG histidine scanning variant #5"
QVQLVQSGAEVKKPGASVKVSCKASGYIFHAYTMHWVRQAPGQGLEWMGWIKPNNGLANYAQKFQGRVTMTRDTSISTAYMELSRLRSDDTAVYYCARSEITTEFDYWGQGTLVTVSS

SEQ ID NO: 18 - protein, 118 aa, Artificial Sequence
  source: /note="Description of Artificial Sequence: Synthetic polypeptide"
  source: /note="Heavy Chain of Telisotuzumab IgG histidine scanning variant #6"
QVQLVQSGAEVKKPGASVKVSCKASGYIFTHYTMHWVRQAPGQGLEWMGWIKPNNGLANYAQKFQGRVTMTRDTSISTAYMELSRLRSDDTAVYYCARSEITTEFDYWGQGTLVTVSS

SEQ ID NO: 19 - protein, 118 aa, Artificial Sequence
  source: /note="Description of Artificial Sequence: Synthetic polypeptide"
  source: /note="Heavy Chain of Telisotuzumab IgG histidine scanning variant #7"
QVQLVQSGAEVKKPGASVKVSCKASGYIFTAHTMHWVRQAPGQGLEWMGWIKPNNGLANYAQKFQGRVTMTRDTSISTAYMELSRLRSDDTAVYYCARSEITTEFDYWGQGTLVTVSS

SEQ ID NO: 20 - protein, 118 aa, Artificial Sequence
  source: /note="Description of Artificial Sequence: Synthetic polypeptide"
  source: /note="Heavy Chain of Telisotuzumab IgG histidine scanning variant #8"
QVQLVQSGAEVKKPGASVKVSCKASGYIFTAYHMHWVRQAPGQGLEWMGWIKPNNGLANYAQKFQGRVTMTRDTSISTAYMELSRLRSDDTAVYYCARSEITTEFDYWGQGTLVTVSS

SEQ ID NO: 21 - protein, 118 aa, Artificial Sequence
  source: /note="Description of Artificial Sequence: Synthetic polypeptide"
  source: /note="Heavy Chain of Telisotuzumab IgG histidine scanning variant #9"
QVQLVQSGAEVKKPGASVKVSCKASGYIFTAYTHHWVRQAPGQGLEWMGWIKPNNGLANYAQKFQGRVTMTRDTSISTAYMELSRLRSDDTAVYYCARSEITTEFDYWGQGTLVTVSS

SEQ ID NO: 22 - protein, 118 aa, Artificial Sequence
  source: /note="Description of Artificial Sequence: Synthetic polypeptide"
  source: /note="Heavy Chain of Telisotuzumab IgG histidine scanning variant #10"
QVQLVQSGAEVKKPGASVKVSCKASGYIFTAYTMAWVRQAPGQGLEWMGWIKPNNGLANYAQKFQGRVTMTRDTSISTAYMELSRLRSDDTAVYYCARSEITTEFDYWGQGTLVTVSS

SEQ ID NO: 23 - protein, 118 aa, Artificial Sequence
  source: /note="Description of Artificial Sequence: Synthetic polypeptide"
  source: /note="Heavy Chain of Telisotuzumab IgG histidine scanning variant #11"
QVQLVQSGAEVKKPGASVKVSCKASGYIFTAYTMHWVRQAPGQGLEWMGHIKPNNGLANYAQKFQGRVTMTRDTSISTAYMELSRLRSDDTAVYYCARSEITTEFDYWGQGTLVTVSS

SEQ ID NO: 24 - protein, 118 aa, Artificial Sequence
  source: /note="Description of Artificial Sequence: Synthetic polypeptide"
  source: /note="Heavy Chain of Telisotuzumab IgG histidine scanning variant #12"
QVQLVQSGAEVKKPGASVKVSCKASGYIFTAYTMHWVRQAPGQGLEWMGWHKPNNGLANYAQKFQGRVTMTRDTSISTAYMELSRLRSDDTAVYYCARSEITTEFDYWGQGTLVTVSS

SEQ ID NO: 25 - protein, 118 aa, Artificial Sequence
  source: /note="Description of Artificial Sequence: Synthetic polypeptide"
  source: /note="Heavy Chain of Telisotuzumab IgG histidine scanning variant #13"
QVQLVQSGAEVKKPGASVKVSCKASGYIFTAYTMHWVRQAPGQGLEWMGWIHPNNGLANYAQKFQGRVTMTRDTSISTAYMELSRLRSDDTAVYYCARSEITTEFDYWGQGTLVTVSS

SEQ ID NO: 26 - protein, 118 aa, Artificial Sequence
  source: /note="Description of Artificial Sequence: Synthetic polypeptide"
  source: /note="Heavy Chain of Telisotuzumab IgG histidine scanning variant #14"
QVQLVQSGAEVKKPGASVKVSCKASGYIFTAYTMHWVRQAPGQGLEWMGWIKHNNGLANYAQKFQGRVTMTRDTSISTAYMELSRLRSDDTAVYYCARSEITTEFDYWGQGTLVTVSS

SEQ ID NO: 27 - protein, 118 aa, Artificial Sequence
  source: /note="Description of Artificial Sequence: Synthetic polypeptide"
  source: /note="Heavy Chain of Telisotuzumab IgG histidine scanning variant #15"
QVQLVQSGAEVKKPGASVKVSCKASGYIFTAYTMHWVRQAPGQGLEWMGWIKPHNGLANYAQKFQGRVTMTRDTSISTAYMELSRLRSDDTAVYYCARSEITTEFDYWGQGTLVTVSS

SEQ ID NO: 28 - protein, 118 aa, Artificial Sequence
  source: /note="Description of Artificial Sequence: Synthetic polypeptide"
  source: /note="Heavy Chain of Telisotuzumab IgG histidine scanning variant #16"
QVQLVQSGAEVKKPGASVKVSCKASGYIFTAYTMHWVRQAPGQGLEWMGWIKPNHGLANYAQKFQGRVTMTRDTSISTAYMELSRLRSDDTAVYYCARSEITTEFDYWGQGTLVTVSS

SEQ ID NO: 29 - protein, 118 aa, Artificial Sequence
  source: /note="Description of Artificial Sequence: Synthetic polypeptide"
  source: /note="Heavy Chain of Telisotuzumab IgG histidine scanning variant #17"
QVQLVQSGAEVKKPGASVKVSCKASGYIFTAYTMHWVRQAPGQGLEWMGWIKPNNHLANYAQKFQGRVTMTRDTSISTAYMELSRLRSDDTAVYYCARSEITTEFDYWGQGTLVTVSS

SEQ ID NO: 30 - protein, 118 aa, Artificial Sequence
  source: /note="Description of Artificial Sequence: Synthetic polypeptide"
  source: /note="Heavy Chain of Telisotuzumab IgG histidine scanning variant #18"
QVQLVQSGAEVKKPGASVKVSCKASGYIFTAYTMHWVRQAPGQGLEWMGWIKPNNGHANYAQKFQGRVTMTRDTSISTAYMELSRLRSDDTAVYYCARSEITTEFDYWGQGTLVTVSS

SEQ ID NO: 31 - protein, 118 aa, Artificial Sequence
  source: /note="Description of Artificial Sequence: Synthetic polypeptide"
  source: /note="Heavy Chain of Telisotuzumab IgG histidine scanning variant #19"
QVQLVQSGAEVKKPGASVKVSCKASGYIFTAYTMHWVRQAPGQGLEWMGWIKPNNGLHNYAQKFQGRVTMTRDTSISTAYMELSRLRSDDTAVYYCARSEITTEFDYWGQGTLVTVSS

SEQ ID NO: 32 - protein, 118 aa, Artificial Sequence
  source: /note="Description of Artificial Sequence: Synthetic polypeptide"
  source: /note="Heavy Chain of Telisotuzumab IgG histidine scanning variant #20"
QVQLVQSGAEVKKPGASVKVSCKASGYIFTAYTMHWVRQAPGQGLEWMGWIKPNNGLAHYAQKFQGRVTMTRDTSISTAYMELSRLRSDDTAVYYCARSEITTEFDYWGQGTLVTVSS

SEQ ID NO: 33 - protein, 118 aa, Artificial Sequence
  source: /note="Description of Artificial Sequence: Synthetic polypeptide"
  source: /note="Heavy Chain of Telisotuzumab IgG histidine scanning variant #21"
QVQLVQSGAEVKKPGASVKVSCKASGYIFTAYTMHWVRQAPGQGLEWMGWIKPNNGLANHAQKFQGRVTMTRDTSISTAYMELSRLRSDDTAVYYCARSEITTEFDYWGQGTLVTVSS

SEQ ID NO: 34 - protein, 118 aa, Artificial Sequence
  source: /note="Description of Artificial Sequence: Synthetic polypeptide"
  source: /note="Heavy Chain of Telisotuzumab IgG histidine scanning variant #22"
QVQLVQSGAEVKKPGASVKVSCKASGYIFTAYTMHWVRQAPGQGLEWMGWIKPNNGLANYHQKFQGRVTMTRDTSISTAYMELSRLRSDDTAVYYCARSEITTEFDYWGQGTLVTVSS

SEQ ID NO: 35 - protein, 118 aa, Artificial Sequence
  source: /note="Description of Artificial Sequence: Synthetic polypeptide"
  source: /note="Heavy Chain of Telisotuzumab IgG histidine scanning variant #23"
QVQLVQSGAEVKKPGASVKVSCKASGYIFTAYTMHWVRQAPGQGLEWMGWIKPNNGLANYAHKFQGRVTMTRDTSISTAYMELSRLRSDDTAVYYCARSEITTEFDYWGQGTLVTVSS

SEQ ID NO: 36 - protein, 118 aa, Artificial Sequence
  source: /note="Description of Artificial Sequence: Synthetic polypeptide"
  source: /note="Heavy Chain of Telisotuzumab IgG histidine scanning variant #24"
QVQLVQSGAEVKKPGASVKVSCKASGYIFTAYTMHWVRQAPGQGLEWMGWIKPNNGLANYAQHFQGRVTMTRDTSISTAYMELSRLRSDDTAVYYCARSEITTEFDYWGQGTLVTVSS

SEQ ID NO: 37 - protein, 118 aa, Artificial Sequence
  source: /note="Description of Artificial Sequence: Synthetic polypeptide"
  source: /note="Heavy Chain of Telisotuzumab IgG histidine scanning variant #25"
QVQLVQSGAEVKKPGASVKVSCKASGYIFTAYTMHWVRQAPGQGLEWMGWIKPNNGLANYAQKHQGRVTMTRDTSISTAYMELSRLRSDDTAVYYCARSEITTEFDYWGQGTLVTVSS

SEQ ID NO: 38 - protein, 118 aa, Artificial Sequence
  source: /note="Description of Artificial Sequence: Synthetic polypeptide"
  source: /note="Heavy Chain of Telisotuzumab IgG histidine scanning variant #26"
QVQLVQSGAEVKKPGASVKVSCKASGYIFTAYTMHWVRQAPGQGLEWMGWIKPNNGLANYAQKFHGRVTMTRDTSISTAYMELSRLRSDDTAVYYCARSEITTEFDYWGQGTLVTVSS

SEQ ID NO: 39 - protein, 118 aa, Artificial Sequence
  source: /note="Description of Artificial Sequence: Synthetic polypeptide"
  source: /note="Heavy Chain of Telisotuzumab IgG histidine scanning variant #27"
QVQLVQSGAEVKKPGASVKVSCKASGYIFTAYTMHWVRQAPGQGLEWMGWIKPNNGLANYAQKFQHRVTMTRDTSISTAYMELSRLRSDDTAVYYCARSEITTEFDYWGQGTLVTVSS

SEQ ID NO: 40 - protein, 118 aa, Artificial Sequence
  source: /note="Description of Artificial Sequence: Synthetic polypeptide"
  source: /note="Heavy Chain of Telisotuzumab IgG histidine scanning variant #28"
QVQLVQSGAEVKKPGASVKVSCKASGYIFTAYTMHWVRQAPGQGLEWMGWIKPNNGLANYAQKFQGRVTMTRDTSISTAYMELSRLRSDDTAVYYCHRSEITTEFDYWGQGTLVTVSS

SEQ ID NO: 41 - protein, 118 aa, Artificial Sequence
  source: /note="Description of Artificial Sequence: Synthetic polypeptide"
  source: /note="Heavy Chain of Telisotuzumab IgG histidine scanning variant #29"
QVQLVQSGAEVKKPGASVKVSCKASGYIFTAYTMHWVRQAPGQGLEWMGWIKPNNGLANYAQKFQGRVTMTRDTSISTAYMELSRLRSDDTAVYYCAHSEITTEFDYWGQGTLVTVSS

SEQ ID NO: 42 - protein, 118 aa, Artificial Sequence
  source: /note="Description of Artificial Sequence: Synthetic polypeptide"
  source: /note="Heavy Chain of Telisotuzumab IgG histidine scanning variant #30"
QVQLVQSGAEVKKPGASVKVSCKASGYIFTAYTMHWVRQAPGQGLEWMGWIKPNNGLANYAQKFQGRVTMTRDTSISTAYMELSRLRSDDTAVYYCARHEITTEFDYWGQGTLVTVSS

SEQ ID NO: 43 - protein, 118 aa, Artificial Sequence
  source: /note="Description of Artificial Sequence: Synthetic polypeptide"
  source: /note="Heavy Chain of Telisotuzumab IgG histidine scanning variant #31"
QVQLVQSGAEVKKPGASVKVSCKASGYIFTAYTMHWVRQAPGQGLEWMGWIKPNNGLANYAQKFQGRVTMTRDTSISTAYMELSRLRSDDTAVYYCARSHITTEFDYWGQGTLVTVSS

SEQ ID NO: 44 - protein, 118 aa, Artificial Sequence
  source: /note="Description of Artificial Sequence: Synthetic polypeptide"
  source: /note="Heavy Chain of Telisotuzumab IgG histidine scanning variant #32"
QVQLVQSGAEVKKPGASVKVSCKASGYIFTAYTMHWVRQAPGQGLEWMGWIKPNNGLANYAQKFQGRVTMTRDTSISTAYMELSRLRSDDTAVYYCARSEHTTEFDYWGQGTLVTVSS

SEQ ID NO: 45 - protein, 118 aa, Artificial Sequence
  source: /note="Description of Artificial Sequence: Synthetic polypeptide"
  source: /note="Heavy Chain of Telisotuzumab IgG histidine scanning variant #33"
QVQLVQSGAEVKKPGASVKVSCKASGYIFTAYTMHWVRQAPGQGLEWMGWIKPNNGLANYAQKFQGRVTMTRDTSISTAYMELSRLRSDDTAVYYCARSEIHTEFDYWGQGTLVTVSS

SEQ ID NO: 46 - protein, 118 aa, Artificial Sequence
  source: /note="Description of Artificial Sequence: Synthetic polypeptide"
  source: /note="Heavy Chain of Telisotuzumab IgG histidine scanning variant #34"
QVQLVQSGAEVKKPGASVKVSCKASGYIFTAYTMHWVRQAPGQGLEWMGWIKPNNGLANYAQKFQGRVTMTRDTSISTAYMELSRLRSDDTAVYYCARSEITHEFDYWGQGTLVTVSS

SEQ ID NO: 47 - protein, 118 aa, Artificial Sequence
  source: /note="Description of Artificial Sequence: Synthetic polypeptide"
  source: /note="Heavy Chain of Telisotuzumab IgG histidine scanning variant #35"
QVQLVQSGAEVKKPGASVKVSCKASGYIFTAYTMHWVRQAPGQGLEWMGWIKPNNGLANYAQKFQGRVTMTRDTSISTAYMELSRLRSDDTAVYYCARSEITTHFDYWGQGTLVTVSS

SEQ ID NO: 48 - protein, 118 aa, Artificial Sequence
  source: /note="Description of Artificial Sequence: Synthetic polypeptide"
  source: /note="Heavy Chain of Telisotuzumab IgG histidine scanning variant #36"
QVQLVQSGAEVKKPGASVKVSCKASGYIFTAYTMHWVRQAPGQGLEWMGWIKPNNGLANYAQKFQGRVTMTRDTSISTAYMELSRLRSDDTAVYYCARSEITTEHDYWGQGTLVTVSS

SEQ ID NO: 49 - protein, 118 aa, Artificial Sequence
  source: /note="Description of Artificial Sequence: Synthetic polypeptide"
  source: /note="Heavy Chain of Telisotuzumab IgG histidine scanning variant #37"
QVQLVQSGAEVKKPGASVKVSCKASGYIFTAYTMHWVRQAPGQGLEWMGWIKPNNGLANYAQKFQGRVTMTRDTSISTAYMELSRLRSDDTAVYYCARSEITTEFHYWGQGTLVTVSS

SEQ ID NO: 50 - protein, 118 aa, Artificial Sequence
  source: /note="Description of Artificial Sequence: Synthetic polypeptide"
  source: /note="Heavy Chain of Telisotuzumab IgG histidine scanning variant #38"
QVQLVQSGAEVKKPGASVKVSCKASGYIFTAYTMHWVRQAPGQGLEWMGWIKPNNGLANYAQKFQGRVTMTRDTSISTAYMELSRLRSDDTAVYYCARSEITTEFDHWGQGTLVTVSS

SEQ ID NO: 51 - protein, 111 aa, Artificial Sequence
  source: /note="Description of Artificial Sequence: Synthetic polypeptide"
  source: /note="Light Chain of Telisotuzumab IgG histidine scanning variant #1"
DIVMTQSPDSLAVSLGERATINCHSSESVDSYANSFLHWYQQKPGQPPKLLIYRASTRESGVPDRFSGSGSGTDFTLTISSLQAEDVAVYYCQQSKEDPLTFGGGTKVEIK

SEQ ID NO: 52 - protein, 111 aa, Artificial Sequence
  source: /note="Description of Artificial Sequence: Synthetic polypeptide"
  source: /note="Light Chain of Telisotuzumab IgG histidine scanning variant #2"
DIVMTQSPDSLAVSLGERATINCKHSESVDSYANSFLHWYQQKPGQPPKLLIYRASTRESGVPDRFSGSGSGTDFTLTISSLQAEDVAVYYCQQSKEDPLTFGGGTKVEIK

SEQ ID NO: 53 - protein, 111 aa, Artificial Sequence
  source: /note="Description of Artificial Sequence: Synthetic polypeptide"
  source: /note="Light Chain of Telisotuzumab IgG histidine scanning variant #3"
DIVMTQSPDSLAVSLGERATINCKSHESVDSYANSFLHWYQQKPGQPPKLLIYRASTRESGVPDRFSGSGSGTDFTLTISSLQAEDVAVYYCQQSKEDPLTFGGGTKVEIK

SEQ ID NO: 54 - protein, 111 aa, Artificial Sequence
  source: /note="Description of Artificial Sequence: Synthetic polypeptide"
  source: /note="Light Chain of Telisotuzumab IgG histidine scanning variant #4"
DIVMTQSPDSLAVSLGERATINCKSSHSVDSYANSFLHWYQQKPGQPPKLLIYRASTRESGVPDRFSGSGSGTDFTLTISSLQAEDVAVYYCQQSKEDPLTFGGGTKVEIK

SEQ ID NO: 55 - protein, 111 aa, Artificial Sequence
  source: /note="Description of Artificial Sequence: Synthetic polypeptide"
  source: /note="Light Chain of Telisotuzumab IgG histidine scanning variant #5"
DIVMTQSPDSLAVSLGERATINCKSSEHVDSYANSFLHWYQQKPGQPPKLLIYRASTRESGVPDRFSGSGSGTDFTLTISSLQAEDVAVYYCQQSKEDPLTFGGGTKVEIK

SEQ ID NO: 56 - protein, 111 aa, Artificial Sequence
  source: /note="Description of Artificial Sequence: Synthetic polypeptide"
  source: /note="Light Chain of Telisotuzumab IgG histidine scanning variant #6"
DIVMTQSPDSLAVSLGERATINCKSSESHDSYANSFLHWYQQKPGQPPKLLIYRASTRESGVPDRFSGSGSGTDFTLTISSLQAEDVAVYYCQQSKEDPLTFGGGTKVEIK

SEQ ID NO: 57 - protein, 111 aa, Artificial Sequence
  source: /note="Description of Artificial Sequence: Synthetic polypeptide"
  source: /note="Light Chain of Telisotuzumab IgG histidine scanning variant #7"
DIVMTQSPDSLAVSLGERATINCKSSESVHSYANSFLHWYQQKPGQPPKLLIYRASTRESGVPDRFSGSGSGTDFTLTISSLQAEDVAVYYCQQSKEDPLTFGGGTKVEIK

SEQ ID NO: 58 - protein, 111 aa, Artificial Sequence
  source: /note="Description of Artificial Sequence: Synthetic polypeptide"
  source: /note="Light Chain of Telisotuzumab IgG histidine scanning variant #8"
DIVMTQSPDSLAVSLGERATINCKSSESVDHYANSFLHWYQQKPGQPPKLLIYRASTRESGVPDRFSGSGSGTDFTLTISSLQAEDVAVYYCQQSKEDPLTFGGGTKVEIK

SEQ ID NO: 59 - protein, 111 aa, Artificial Sequence
  source: /note="Description of Artificial Sequence: Synthetic polypeptide"
  source: /note="Light Chain of Telisotuzumab IgG histidine scanning variant #9"
DIVMTQSPDSLAVSLGERATINCKSSESVDSHANSFLHWYQQKPGQPPKLLIYRASTRESGVPDRFSGSGSGTDFTLTISSLQAEDVAVYYCQQSKEDPLTFGGGTKVEIK

SEQ ID NO: 60 - protein, 111 aa, Artificial Sequence
  source: /note="Description of Artificial Sequence: Synthetic polypeptide"
  source: /note="Light Chain of Telisotuzumab IgG histidine scanning variant #10"
DIVMTQSPDSLAVSLGERATINCKSSESVDSYHNSFLHWYQQKPGQPPKLLIYRASTRESGVPDRFSGSGSGTDFTLTISSLQAEDVAVYYCQQSKEDPLTFGGGTKVEIK

SEQ ID NO: 61 - protein, 111 aa, Artificial Sequence
  source: /note="Description of Artificial Sequence: Synthetic polypeptide"
  source: /note="Light Chain of Telisotuzumab IgG histidine scanning variant #11"
DIVMTQSPDSLAVSLGERATINCKSSESVDSYAHSFLHWYQQKPGQPPKLLIYRASTRESGVPDRFSGSGSGTDFTLTISSLQAEDVAVYYCQQSKEDPLTFGGGTKVEIK

SEQ ID NO: 62 - protein, 111 aa, Artificial Sequence
  source: /note="Description of Artificial Sequence: Synthetic polypeptide"
  source: /note="Light Chain of Telisotuzumab IgG histidine scanning variant #12"
DIVMTQSPDSLAVSLGERATINCKSSESVDSYANHFLHWYQQKPGQPPKLLIYRASTRESGVPDRFSGSGSGTDFTLTISSLQAEDVAVYYCQQSKEDPLTFGGGTKVEIK

SEQ ID NO: 63 - protein, 111 aa, Artificial Sequence
  source: /note="Description of Artificial Sequence: Synthetic polypeptide"
  source: /note="Light Chain of Telisotuzumab IgG histidine scanning variant #13"
DIVMTQSPDSLAVSLGERATINCKSSESVDSYANSHLHWYQQKPGQPPKLLIYRASTRESGVPDRFSGSGSGTDFTLTISSLQAEDVAVYYCQQSKEDPLTFGGGTKVEIK

SEQ ID NO: 64 - protein, 111 aa, Artificial Sequence
  source: /note="Description of Artificial Sequence: Synthetic polypeptide"
  source: /note="Light Chain of Telisotuzumab IgG histidine scanning variant #14"
DIVMTQSPDSLAVSLGERATINCKSSESVDSYANSFHHWYQQKPGQPPKLLIYRASTRESGVPDRFSGSGSGTDFTLTISSLQAEDVAVYYCQQSKEDPLTFGGGTKVEIK

SEQ ID NO: 65 - protein, 111 aa, Artificial Sequence
  source: /note="Description of Artificial Sequence: Synthetic polypeptide"
  source: /note="Light Chain of Telisotuzumab IgG histidine scanning variant #15"
DIVMTQSPDSLAVSLGERATINCKSSESVDSYANSFLAWYQQKPGQPPKLLIYRASTRESGVPDRFSGSGSGTDFTLTISSLQAEDVAVYYCQQSKEDPLTFGGGTKVEIK

SEQ ID NO: 66 - protein, 111 aa, Artificial Sequence
  source: /note="Description of Artificial Sequence: Synthetic polypeptide"
  source: /note="Light Chain of Telisotuzumab IgG histidine scanning variant #16"
DIVMTQSPDSLAVSLGERATINCKSSESVDSYANSFLHWYQQKPGQPPKLLIYHASTRESGVPDRFSGSGSGTDFTLTISSLQAEDVAVYYCQQSKEDPLTFGGGTKVEIK

SEQ ID NO: 67 - protein, 111 aa, Artificial Sequence
  source: /note="Description of Artificial Sequence: Synthetic polypeptide"
  source: /note="Light Chain of Telisotuzumab IgG histidine scanning variant #17"
DIVMTQSPDSLAVSLGERATINCKSSESVDSYANSFLHWYQQKPGQPPKLLIYRHSTRESGVPDRFSGSGSGTDFTLTISSLQAEDVAVYYCQQSKEDPLTFGGGTKVEIK

SEQ ID NO: 68 - protein, 111 aa, Artificial Sequence
  source: /note="Description of Artificial Sequence: Synthetic polypeptide"
  source: /note="Light Chain of Telisotuzumab IgG histidine scanning variant #18"
DIVMTQSPDSLAVSLGERATINCKSSESVDSYANSFLHWYQQKPGQPPKLLIYRAHTRESGVPDRFSGSGSGTDFTLTISSLQAEDVAVYYCQQSKEDPLTFGGGTKVEIK

SEQ ID NO: 69 - protein, 111 aa, Artificial Sequence
  source: /note="Description of Artificial Sequence: Synthetic polypeptide"
  source: /note="Light Chain of Telisotuzumab IgG histidine scanning variant #19"
DIVMTQSPDSLAVSLGERATINCKSSESVDSYANSFLHWYQQKPGQPPKLLIYRASHRESGVPDRFSGSGSGTDFTLTISSLQAEDVAVYYCQQSKEDPLTFGGGTKVEIK

SEQ ID NO: 70 - protein, 111 aa, Artificial Sequence
  source: /note="Description of Artificial Sequence: Synthetic polypeptide"
  source: /note="Light Chain of Telisotuzumab IgG histidine scanning variant #20"
DIVMTQSPDSLAVSLGERATINCKSSESVDSYANSFLHWYQQKPGQPPKLLIYRASTHESGVPDRFSGSGSGTDFTLTISSLQAEDVAVYYCQQSKEDPLTFGGGTKVEIK

SEQ ID NO: 71 - protein, 111 aa, Artificial Sequence
  source: /note="Description of Artificial Sequence: Synthetic polypeptide"
  source: /note="Light Chain of Telisotuzumab IgG histidine scanning variant #21"
DIVMTQSPDSLAVSLGERATINCKSSESVDSYANSFLHWYQQKPGQPPKLLIYRASTRHSGVPDRFSGSGSGTDFTLTISSLQAEDVAVYYCQQSKEDPLTFGGGTKVEIK

SEQ ID NO: 72 - protein, 111 aa, Artificial Sequence
  source: /note="Description of Artificial Sequence: Synthetic polypeptide"
  source: /note="Light Chain of Telisotuzumab IgG histidine scanning variant #22"
DIVMTQSPDSLAVSLGERATINCKSSESVDSYANSFLHWYQQKPGQPPKLLIYRASTREHGVPDRFSGSGSGTDFTLTISSLQAEDVAVYYCQQSKEDPLTFGGGTKVEIK

SEQ ID NO: 73 - protein, 111 aa, Artificial Sequence
  source: /note="Description of Artificial Sequence: Synthetic polypeptide"
  source: /note="Light Chain of Telisotuzumab IgG histidine scanning variant #23"
DIVMTQSPDSLAVSLGERATINCKSSESVDSYANSFLHWYQQKPGQPPKLLIYRASTRESGVPDRFSGSGSGTDFTLTISSLQAEDVAVYYCHQSKEDPLTFGGGTKVEIK

SEQ ID NO: 74 - protein, 111 aa, Artificial Sequence
  source: /note="Description of Artificial Sequence: Synthetic polypeptide"
  source: /note="Light Chain of Telisotuzumab IgG histidine scanning variant #24"
DIVMTQSPDSLAVSLGERATINCKSSESVDSYANSFLHWYQQKPGQPPKLLIYRASTRESGVPDRFSGSGSGTDFTLTISSLQAEDVAVYYCQHSKEDPLTFGGGTKVEIK

SEQ ID NO: 75 - protein, 111 aa, Artificial Sequence
  source: /note="Description of Artificial Sequence: Synthetic polypeptide"
  source: /note="Light Chain of Telisotuzumab IgG histidine scanning variant #25"
DIVMTQSPDSLAVSLGERATINCKSSESVDSYANSFLHWYQQKPGQPPKLLIYRASTRESGVPDRFSGSGSGTDFTLTISSLQAEDVAVYYCQQHKEDPLTFGGGTKVEIK

SEQ ID NO: 76 - protein, 111 aa, Artificial Sequence
  source: /note="Description of Artificial Sequence: Synthetic polypeptide"
  source: /note="Light Chain of Telisotuzumab IgG histidine scanning variant #26"
DIVMTQSPDSLAVSLGERATINCKSSESVDSYANSFLHWYQQKPGQPPKLLIYRASTRESGVPDRFSGSGSGTDFTLTISSLQAEDVAVYYCQQSHEDPLTFGGGTKVEIK

SEQ ID NO: 77 - protein, 111 aa, Artificial Sequence
  source: /note="Description of Artificial Sequence: Synthetic polypeptide"
  source: /note="Light Chain of Telisotuzumab IgG histidine scanning variant #27"
DIVMTQSPDSLAVSLGERATINCKSSESVDSYANSFLHWYQQKPGQPPKLLIYRASTRESGVPDRFSGSGSGTDFTLTISSLQAEDVAVYYCQQSKHDPLTFGGGTKVEIK

SEQ ID NO: 78 - protein, 111 aa, Artificial Sequence
  source: /note="Description of Artificial Sequence: Synthetic polypeptide"
  source: /note="Light Chain of Telisotuzumab IgG histidine scanning variant #28"
DIVMTQSPDSLAVSLGERATINCKSSESVDSYANSFLHWYQQKPGQPPKLLIYRASTRESGVPDRFSGSGSGTDFTLTISSLQAEDVAVYYCQQSKEHPLTFGGGTKVEIK

SEQ ID NO: 79 - protein, 111 aa, Artificial Sequence
  source: /note="Description of Artificial Sequence: Synthetic polypeptide"
  source: /note="Light Chain of Telisotuzumab IgG histidine scanning variant #29"
DIVMTQSPDSLAVSLGERATINCKSSESVDSYANSFLHWYQQKPGQPPKLLIYRASTRESGVPDRFSGSGSGTDFTLTISSLQAEDVAVYYCQQSKEDHLTFGGGTKVEIK

SEQ ID NO: 80 - protein, 111 aa, Artificial Sequence
  source: /note="Description of Artificial Sequence: Synthetic polypeptide"
  source: /note="Light Chain of Telisotuzumab IgG histidine scanning variant #30"
DIVMTQSPDSLAVSLGERATINCKSSESVDSYANSFLHWYQQKPGQPPKLLIYRASTRESGVPDRFSGSGSGTDFTLTISSLQAEDVAVYYCQQSKEDPHTFGGGTKVEIK

SEQ ID NO: 81 - protein, 111 aa, Artificial Sequence
  source: /note="Description of Artificial Sequence: Synthetic polypeptide"
  source: /note="Light Chain of Telisotuzumab IgG histidine scanning variant #31"
DIVMTQSPDSLAVSLGERATINCKSSESVDSYANSFLHWYQQKPGQPPKLLIYRASTRESGVPDRFSGSGSGTDFTLTISSLQAEDVAVYYCQQSKEDPLHFGGGTKVEIK

SEQ ID NO: 82 - protein, 118 aa, Artificial Sequence
  source: /note="Description of Artificial Sequence: Synthetic polypeptide"
  source: /note="Heavy Chain Combinations of Telisotuzumab IgG histidine scanning variant #1"
QVQLVQSGAEVKKPGASVKVSCKASGHIFTAYTMHWVRQAPGQGLEWMGWIKPNNGLANYAQKFQGRVTMTRDTSISTAYMELSRLRSDDTAVYYCARHEITTEFDYWGQGTLVTVSS

SEQ ID NO: 83 - protein, 118 aa, Artificial Sequence
  source: /note="Description of Artificial Sequence: Synthetic polypeptide"
  source: /note="Heavy Chain Combinations of Telisotuzumab IgG histidine scanning variant #2"
QVQLVQSGAEVKKPGASVKVSCKASGHIFTAYTMHWVRQAPGQGLEWMGWIKPNNGLANYAQKFQGRVTMTRDTSISTAYMELSRLRSDDTAVYYCARSEITHEFDYWGQGTLVTVSS

SEQ ID NO: 84 - protein, 118 aa, Artificial Sequence
  source: /note="Description of Artificial Sequence: Synthetic polypeptide"
  source: /note="Heavy Chain Combinations of Telisotuzumab IgG histidine scanning variant #3"
QVQLVQSGAEVKKPGASVKVSCKASGHIFTAYTMHWVRQAPGQGLEWMGWIKPNNGLANYAQKFQGRVTMTRDTSISTAYMELSRLRSDDTAVYYCARSEITTEFDHWGQGTLVTVSS

SEQ ID NO: 85 - protein, 118 aa, Artificial Sequence
  source: /note="Description of Artificial Sequence: Synthetic polypeptide"
  source: /note="Heavy Chain Combinations of Telisotuzumab IgG histidine scanning variant #4"
QVQLVQSGAEVKKPGASVKVSCKASGYIFTAYTMHWVRQAPGQGLEWMGWIKPNNGLANYAQKFQGRVTMTRDTSISTAYMELSRLRSDDTAVYYCARHEITHEFDYWGQGTLVTVSS

SEQ ID NO: 86 - protein, 118 aa, Artificial Sequence
  source: /note="Description of Artificial Sequence: Synthetic polypeptide"
  source: /note="Heavy Chain Combinations of Telisotuzumab IgG histidine scanning variant #5"
QVQLVQSGAEVKKPGASVKVSCKASGYIFTAYTMHWVRQAPGQGLEWMGWIKPNNGLANYAQKFQGRVTMTRDTSISTAYMELSRLRSDDTAVYYCARHEITTEFDHWGQGTLVTVSS

SEQ ID NO: 87 - protein, 118 aa, Artificial Sequence
  source: /note="Description of Artificial Sequence: Synthetic polypeptide"
  source: /note="Heavy Chain Combinations of Telisotuzumab IgG histidine scanning variant #6"
QVQLVQSGAEVKKPGASVKVSCKASGYIFTAYTMHWVRQAPGQGLEWMGWIKPNNGLANYAQKFQGRVTMTRDTSISTAYMELSRLRSDDTAVYYCARSEITHEFDHWGQGTLVTVSS

SEQ ID NO: 88 - protein, 118 aa, Artificial Sequence
  source: /note="Description of Artificial Sequence: Synthetic polypeptide"
  source: /note="Heavy Chain Combinations of Telisotuzumab IgG histidine scanning variant #7"
QVQLVQSGAEVKKPGASVKVSCKASGHIFTAYTMHWVRQAPGQGLEWMGWIKPNNGLANYAQKFQGRVTMTRDTSISTAYMELSRLRSDDTAVYYCARHEITHEFDYWGQGTLVTVSS

SEQ ID NO: 89 - protein, 118 aa, Artificial Sequence
  source: /note="Description of Artificial Sequence: Synthetic polypeptide"
  source: /note="Heavy Chain Combinations of Telisotuzumab IgG histidine scanning variant #8"
QVQLVQSGAEVKKPGASVKVSCKASGHIFTAYTMHWVRQAPGQGLEWMGWIKPNNGLANYAQKFQGRVTMTRDTSISTAYMELSRLRSDDTAVYYCARHEITTEFDHWGQGTLVTVSS

SEQ ID NO: 90 - protein, 118 aa, Artificial Sequence
  source: /note="Description of Artificial Sequence: Synthetic polypeptide"
  source: /note="Heavy Chain Combinations of Telisotuzumab IgG histidine scanning variant #9"
QVQLVQSGAEVKKPGASVKVSCKASGHIFTAYTMHWVRQAPGQGLEWMGWIKPNNGLANYAQKFQGRVTMTRDTSISTAYMELSRLRSDDTAVYYCARSEITHEFDHWGQGTLVTVSS

SEQ ID NO: 91 - protein, 118 aa, Artificial Sequence
  source: /note="Description of Artificial Sequence: Synthetic polypeptide"
  source: /note="Heavy Chain Combinations of Telisotuzumab IgG histidine scanning variant #10"
QVQLVQSGAEVKKPGASVKVSCKASGYIFTAYTMHWVRQAPGQGLEWMGWIKPNNGLANYAQKFQGRVTMTRDTSISTAYMELSRLRSDDTAVYYCARHEITHEFDHWGQGTLVTVSS

SEQ ID NO: 92 - protein, 118 aa, Artificial Sequence
  source: /note="Description of Artificial Sequence: Synthetic polypeptide"
  source: /note="Heavy Chain Combinations of Telisotuzumab IgG histidine scanning variant #11"
QVQLVQSGAEVKKPGASVKVSCKASGHIFTAYTMHWVRQAPGQGLEWMGWIKPNNGLANYAQKFQGRVTMTRDTSISTAYMELSRLRSDDTAVYYCHRSEITTEFDYWGQGTLVTVSS

SEQ ID NO: 93 - protein, 118 aa, Artificial Sequence
  source: /note="Description of Artificial Sequence: Synthetic polypeptide"
  source: /note="Heavy Chain Combinations of Telisotuzumab IgG histidine scanning variant #12"
QVQLVQSGAEVKKPGASVKVSCKASGYIFTAYTMHWVRQAPGQGLEWMGWIKPNNGLANYAQKFQGRVTMTRDTSISTAYMELSRLRSDDTAVYYCHRHEITTEFDYWGQGTLVTVSS

SEQ ID NO: 94 - protein, 118 aa, Artificial Sequence
  source: /note="Description of Artificial Sequence: Synthetic polypeptide"
  source: /note="Heavy Chain Combinations of Telisotuzumab IgG histidine scanning variant #13"
QVQLVQSGAEVKKPGASVKVSCKASGYIFTAYTMHWVRQAPGQGLEWMGWIKPNNGLANYAQKFQGRVTMTRDTSISTAYMELSRLRSDDTAVYYCHRSEITHEFDYWGQGTLVTVSS

SEQ ID NO: 95 - protein, 118 aa, Artificial Sequence
  source: /note="Description of Artificial Sequence: Synthetic polypeptide"
  source: /note="Heavy Chain Combinations of Telisotuzumab IgG histidine scanning variant #14"
QVQLVQSGAEVKKPGASVKVSCKASGYIFTAYTMHWVRQAPGQGLEWMGWIKPNNGLANYAQKFQGRVTMTRDTSISTAYMELSRLRSDDTAVYYCHRSEITTEFDHWGQGTLVTVSS

SEQ ID NO: 96 - protein, 118 aa, Artificial Sequence
  source: /note="Description of Artificial Sequence: Synthetic polypeptide"
  source: /note="Heavy Chain Combinations of Telisotuzumab IgG histidine scanning variant #15"
QVQLVQSGAEVKKPGASVKVSCKASGHIFTAYTMHWVRQAPGQGLEWMGWIKPNNGLANYAQKFQGRVTMTRDTSISTAYMELSRLRSDDTAVYYCAHSEITTEFDYWGQGTLVTVSS

SEQ ID NO: 97 - protein, 118 aa, Artificial Sequence
  source: /note="Description of Artificial Sequence: Synthetic polypeptide"
  source: /note="Heavy Chain Combinations of Telisotuzumab IgG histidine scanning variant #16"
QVQLVQSGAEVKKPGASVKVSCKASGYIFTAYTMHWVRQAPGQGLEWMGWIKPNNGLANYAQKFQGRVTMTRDTSISTAYMELSRLRSDDTAVYYCAHHEITTEFDYWGQGTLVTVSS

SEQ ID NO: 98 - protein, 118 aa, Artificial Sequence
  source: /note="Description of Artificial Sequence: Synthetic polypeptide"
  source: /note="Heavy Chain Combinations of Telisotuzumab IgG histidine scanning variant #17"
QVQLVQSGAEVKKPGASVKVSCKASGYIFTAYTMHWVRQAPGQGLEWMGWIKPNNGLANYAQKFQGRVTMTRDTSISTAYMELSRLRSDDTAVYYCAHSEITHEFDYWGQGTLVTVSS

SEQ ID NO: 99 - protein, 118 aa, Artificial Sequence
  source: /note="Description of Artificial Sequence: Synthetic polypeptide"
  source: /note="Heavy Chain Combinations of Telisotuzumab IgG histidine scanning variant #18"
QVQLVQSGAEVKKPGASVKVSCKASGYIFTAYTMHWVRQAPGQGLEWMGWIKPNNGLANYAQKFQGRVTMTRDTSISTAYMELSRLRSDDTAVYYCAHSEITTEFDHWGQGTLVTVSS

SEQ ID NO: 100 - protein, 118 aa, Artificial Sequence
  source: /note="Description of Artificial Sequence: Synthetic polypeptide"
  source: /note="Heavy Chain Combinations of Telisotuzumab IgG histidine scanning variant #19"
QVQLVQSGAEVKKPGASVKVSCKASGHIFTAYTMHWVRQAPGQGLEWMGWIKPNNGLANYAQKFQGRVTMTRDTSISTAYMELSRLRSDDTAVYYCARSEIHTEFDYWGQGTLVTVSS

SEQ ID NO: 101 - protein, 118 aa, Artificial Sequence
  source: /note="Description of Artificial Sequence: Synthetic polypeptide"
  source: /note="Heavy Chain Combinations of Telisotuzumab IgG histidine scanning variant #20"
QVQLVQSGAEVKKPGASVKVSCKASGYIFTAYTMHWVRQAPGQGLEWMGWIKPNNGLANYAQKFQGRVTMTRDTSISTAYMELSRLRSDDTAVYYCARHEIHTEFDYWGQGTLVTVSS

SEQ ID NO: 102 - protein, 118 aa, Artificial Sequence
  source: /note="Description of Artificial Sequence: Synthetic polypeptide"
  source: /note="Heavy Chain Combinations of Telisotuzumab IgG histidine scanning variant #21"
QVQLVQSGAEVKKPGASVKVSCKASGYIFTAYTMHWVRQAPGQGLEWMGWIKPNNGLANYAQKFQGRVTMTRDTSISTAYMELSRLRSDDTAVYYCARSEIHHEFDYWGQGTLVTVSS

SEQ ID NO: 103 - protein, 118 aa, Artificial Sequence
  source: /note="Description of Artificial Sequence: Synthetic polypeptide"
  source: /note="Heavy Chain Combinations of Telisotuzumab IgG histidine scanning variant #22"
QVQLVQSGAEVKKPGASVKVSCKASGYIFTAYTMHWVRQAPGQGLEWMGWIKPNNGLANYAQKFQGRVTMTRDTSISTAYMELSRLRSDDTAVYYCARSEIHTEFDHWGQGTLVTVSS

SEQ ID NO: 104 - protein, 118 aa, Artificial Sequence
  source: /note="Description of Artificial Sequence: Synthetic polypeptide"
  source: /note="Heavy Chain Combinations of Telisotuzumab IgG histidine scanning variant #23"
QVQLVQSGAEVKKPGASVKVSCKASGHIFTAYTMHWVRQAPGQGLEWMGWIKPNNGLANYAQKFQGRVTMTRDTSISTAYMELSRLRSDDTAVYYCHRSEITTEFDHWGQGTLVTVSS

SEQ ID NO: 105 - protein, 118 aa, Artificial Sequence
  source: /note="Description of Artificial Sequence: Synthetic polypeptide"
  source: /note="Heavy Chain Combinations of Telisotuzumab IgG histidine scanning variant #24"
QVQLVQSGAEVKKPGASVKVSCKASGYIFTAYTMHWVRQAPGQGLEWMGWIKPNNGLANYAQKFQGRVTMTRDTSISTAYMELSRLRSDDTAVYYCHRHEITTEFDHWGQGTLVTVSS

SEQ ID NO: 106 - protein, 118 aa, Artificial Sequence
  source: /note="Description of Artificial Sequence: Synthetic polypeptide"
  source: /note="Heavy Chain Combinations of Telisotuzumab IgG histidine scanning variant #25"
QVQLVQSGAEVKKPGASVKVSCKASGYIFTAYTMHWVRQAPGQGLEWMGWIKPNNGLANYAQKFQGRVTMTRDTSISTAYMELSRLRSDDTAVYYCHRSEITHEFDHWGQGTLVTVSS

SEQ ID NO: 107 - protein, 118 aa, Artificial Sequence
  source: /note="Description of Artificial Sequence: Synthetic polypeptide"
  source: /note="Heavy Chain Combinations of Telisotuzumab IgG histidine scanning variant #26"
QVQLVQSGAEVKKPGASVKVSCKASGHIFTAYTMHWVRQAPGQGLEWMGWIKPNNGLANYAQKFQGRVTMTRDTSISTAYMELSRLRSDDTAVYYCHRHEITTEFDHWGQGTLVTVSS

SEQ ID NO: 108 - protein, 118 aa, Artificial Sequence
  source: /note="Description of Artificial Sequence: Synthetic polypeptide"
  source: /note="Heavy Chain Combinations of Telisotuzumab IgG histidine scanning variant #27"
QVQLVQSGAEVKKPGASVKVSCKASGHIFTAYTMHWVRQAPGQGLEWMGWIKPNNGLANYAQKFQGRVTMTRDTSISTAYMELSRLRSDDTAVYYCHRSEITHEFDHWGQGTLVTVSS

SEQ ID NO: 109 - protein, 118 aa, Artificial Sequence
  source: /note="Description of Artificial Sequence: Synthetic polypeptide"
  source: /note="Heavy Chain Combinations of Telisotuzumab IgG histidine scanning variant #28"
QVQLVQSGAEVKKPGASVKVSCKASGHIFTAYTMHWVRQAPGQGLEWMGWIKPNNGLANYAQKFQGRVTMTRDTSISTAYMELSRLRSDDTAVYYCAHSEITTEFDHWGQGTLVTVSS

SEQ ID NO: 110 - protein, 118 aa, Artificial Sequence
  source: /note="Description of Artificial Sequence: Synthetic polypeptide"
  source: /note="Heavy Chain Combinations of Telisotuzumab IgG histidine scanning variant #29"
QVQLVQSGAEVKKPGASVKVSCKASGYIFTAYTMHWVRQAPGQGLEWMGWIKPNNGLANYAQKFQGRVTMTRDTSISTAYMELSRLRSDDTAVYYCAHHEITTEFDHWGQGTLVTVSS

SEQ ID NO: 111 - protein, 118 aa, Artificial Sequence
  source: /note="Description of Artificial Sequence: Synthetic polypeptide"
  source: /note="Heavy Chain Combinations of Telisotuzumab IgG histidine scanning variant #30"
QVQLVQSGAEVKKPGASVKVSCKASGYIFTAYTMHWVRQAPGQGLEWMGWIKPNNGLANYAQKFQGRVTMTRDTSISTAYMELSRLRSDDTAVYYCAHSEITHEFDHWGQGTLVTVSS

SEQ ID NO: 112 - protein, 118 aa, Artificial Sequence
  source: /note="Description of Artificial Sequence: Synthetic polypeptide"
  source: /note="Heavy Chain Combinations of Telisotuzumab IgG histidine scanning variant #31"
QVQLVQSGAEVKKPGASVKVSCKASGHIFTAYTMHWVRQAPGQGLEWMGWIKPNNGLANYAQKFQGRVTMTRDTSISTAYMELSRLRSDDTAVYYCAHHEITTEFDHWGQGTLVTVSS

SEQ ID NO: 113 - protein, 118 aa, Artificial Sequence
  source: /note="Description of Artificial Sequence: Synthetic polypeptide"
  source: /note="Heavy Chain Combinations of Telisotuzumab IgG histidine scanning variant #32"
QVQLVQSGAEVKKPGASVKVSCKASGHIFTAYTMHWVRQAPGQGLEWMGWIKPNNGLANYAQKFQGRVTMTRDTSISTAYMELSRLRSDDTAVYYCAHSEITHEFDHWGQGTLVTVSS

SEQ ID NO: 114 - protein, 118 aa, Artificial Sequence
  source: /note="Description of Artificial Sequence: Synthetic polypeptide"
  source: /note="Heavy Chain Combinations of Telisotuzumab IgG histidine scanning variant #33"
QVQLVQSGAEVKKPGASVKVSCKASGHIFTAYTMHWVRQAPGQGLEWMGWIKPNNGLANYAQKFQGRVTMTRDTSISTAYMELSRLRSDDTAVYYCARSEIHTEFDHWGQGTLVTVSS

SEQ ID NO: 115 - protein, 118 aa, Artificial Sequence
  source: /note="Description of Artificial Sequence: Synthetic polypeptide"
  source: /note="Heavy Chain Combinations of Telisotuzumab IgG histidine scanning variant #34"
QVQLVQSGAEVKKPGASVKVSCKASGYIFTAYTMHWVRQAPGQGLEWMGWIKPNNGLANYAQKFQGRVTMTRDTSISTAYMELSRLRSDDTAVYYCARHEIHTEFDHWGQGTLVTVSS

SEQ ID NO: 116 - protein, 118 aa, Artificial Sequence
  source: /note="Description of Artificial Sequence: Synthetic polypeptide"
  source: /note="Heavy Chain Combinations of Telisotuzumab IgG histidine scanning variant #35"
QVQLVQSGAEVKKPGASVKVSCKASGYIFTAYTMHWVRQAPGQGLEWMGWIKPNNGLANYAQKFQGRVTMTRDTSISTAYMELSRLRSDDTAVYYCARSEIHHEFDHWGQGTLVTVSS

SEQ ID NO: 117 - protein, 118 aa, Artificial Sequence
  source: /note="Description of Artificial Sequence: Synthetic polypeptide"
  source: /note="Heavy Chain Combinations of Telisotuzumab IgG histidine scanning variant #36"
QVQLVQSGAEVKKPGASVKVSCKASGHIFTAYTMHWVRQAPGQGLEWMGWIKPNNGLANYAQKFQGRVTMTRDTSISTAYMELSRLRSDDTAVYYCARHEIHTEFDHWGQGTLVTVSS

SEQ ID NO: 118 - protein, 118 aa, Artificial Sequence
  source: /note="Description of Artificial Sequence: Synthetic polypeptide"
  source: /note="Heavy Chain Combinations of Telisotuzumab IgG histidine scanning variant #37"
QVQLVQSGAEVKKPGASVKVSCKASGHIFTAYTMHWVRQAPGQGLEWMGWIKPNNGLANYAQKFQGRVTMTRDTSISTAYMELSRLRSDDTAVYYCARSEIHHEFDHWGQGTLVTVSS

SEQ ID NO: 119 - protein, 118 aa, Artificial Sequence
  source: /note="Description of Artificial Sequence: Synthetic polypeptide"
  source: /note="Heavy Chain Combinations of Telisotuzumab IgG histidine scanning variant #38"
QVQLVQSGAEVKKPGASVKVSCKASGYIFTAYTMHWVRQAPGQGLEWMGWIKPNNGLANYAQKFQGRVTMTRDTSISTAYMELSRLRSDDTAVYYCHHSEITTEFDYWGQGTLVTVSS

SEQ ID NO: 120 - protein, 118 aa, Artificial Sequence
  source: /note="Description of Artificial Sequence: Synthetic polypeptide"
  source: /note="Heavy Chain Combinations of Telisotuzumab IgG histidine scanning variant #39"
QVQLVQSGAEVKKPGASVKVSCKASGYIFTAYTMHWVRQAPGQGLEWMGWIKPNNGLANYAQKFQGRVTMTRDTSISTAYMELSRLRSDDTAVYYCAHSEIHTEFDYWGQGTLVTVSS

SEQ ID NO: 121 - protein, 118 aa, Artificial Sequence
  source: /note="Description of Artificial Sequence: Synthetic polypeptide"
  source: /note="Heavy Chain Combinations of Telisotuzumab IgG histidine scanning variant #40"
QVQLVQSGAEVKKPGASVKVSCKASGYIFTAYTMHWVRQAPGQGLEWMGWIKPNNGLANYAQKFQGRVTMTRDTSISTAYMELSRLRSDDTAVYYCHRSEIHTEFDYWGQGTLVTVSS

SEQ ID NO: 122 - protein, 118 aa, Artificial Sequence
  source: /note="Description of Artificial Sequence: Synthetic polypeptide"
  source: /note="Heavy Chain Combinations of Telisotuzumab IgG histidine scanning variant #41"
QVQLVQSGAEVKKPGASVKVSCKASGYIFTAYTMHWVRQAPGQGLEWMGWIKPNNGLANYAQKFQGRVTMTRDTSISTAYMELSRLRSDDTAVYYCHHSEIHTEFDYWGQGTLVTVSS

SEQ ID NO: 123 - protein, 118 aa, Artificial Sequence
  source: /note="Description of Artificial Sequence: Synthetic polypeptide"
  source: /note="Heavy Chain Combinations of Telisotuzumab IgG histidine scanning variant #42"
QVQLVQSGAEVKKPGASVKVSCKASGHIFTAYTMHWVRQAPGQGLEWMGWIKPNNGLANYAQKFQGRVTMTRDTSISTAYMELSRLRSDDTAVYYCHHSEITTEFDYWGQGTLVTVSS

SEQ ID NO: 124 - protein, 118 aa, Artificial Sequence
  source: /note="Description of Artificial Sequence: Synthetic polypeptide"
  source: /note="Heavy Chain Combinations of Telisotuzumab IgG histidine scanning variant #43"
QVQLVQSGAEVKKPGASVKVSCKASGYIFTAYTMHWVRQAPGQGLEWMGWIKPNNGLANYAQKFQGRVTMTRDTSISTAYMELSRLRSDDTAVYYCHHHEITTEFDYWGQGTLVTVSS

SEQ ID NO: 125 - protein, 118 aa, Artificial Sequence
  source: /note="Description of Artificial Sequence: Synthetic polypeptide"
  source: /note="Heavy Chain Combinations of Telisotuzumab IgG histidine scanning variant #44"
QVQLVQSGAEVKKPGASVKVSCKASGYIFTAYTMHWVRQAPGQGLEWMGWIKPNNGLANYAQKFQGRVTMTRDTSISTAYMELSRLRSDDTAVYYCHHSEITHEFDYWGQGTLVTVSS

SEQ ID NO: 126 - protein, 118 aa, Artificial Sequence
  source: /note="Description of Artificial Sequence: Synthetic polypeptide"
  source: /note="Heavy Chain Combinations of Telisotuzumab IgG histidine scanning variant #45"
QVQLVQSGAEVKKPGASVKVSCKASGYIFTAYTMHWVRQAPGQGLEWMGWIKPNNGLANYAQKFQGRVTMTRDTSISTAYMELSRLRSDDTAVYYCHHSEITTEFDHWGQGTLVTVSS

SEQ ID NO: 127 - protein, 118 aa, Artificial Sequence
  source: /note="Description of Artificial Sequence: Synthetic polypeptide"
  source: /note="Heavy Chain Combinations of Telisotuzumab IgG histidine scanning variant #46"
QVQLVQSGAEVKKPGASVKVSCKASGHIFTAYTMHWVRQAPGQGLEWMGWIKPNNGLANYAQKFQGRVTMTRDTSISTAYMELSRLRSDDTAVYYCHRSEIHTEFDYWGQGTLVTVSS

SEQ ID NO: 128 - protein, 118 aa, Artificial Sequence
  source: /note="Description of Artificial Sequence: Synthetic polypeptide"
  source: /note="Heavy Chain Combinations of Telisotuzumab IgG histidine scanning variant #47"
QVQLVQSGAEVKKPGASVKVSCKASGYIFTAYTMHWVRQAPGQGLEWMGWIKPNNGLANYAQKFQGRVTMTRDTSISTAYMELSRLRSDDTAVYYCHRHEIHTEFDYWGQGTLVTVSS

SEQ ID NO: 129 - protein, 118 aa, Artificial Sequence
  source: /note="Description of Artificial Sequence: Synthetic polypeptide"
  source: /note="Heavy Chain Combinations of Telisotuzumab IgG histidine scanning variant #48"
QVQLVQSGAEVKKPGASVKVSCKASGYIFTAYTMHWVRQAPGQGLEWMGWIKPNNGLANYAQKFQGRVTMTRDTSISTAYMELSRLRSDDTAVYYCHRSEIHHEFDYWGQGTLVTVSS

SEQ ID NO: 130 - protein, 118 aa, Artificial Sequence
  source: /note="Description of Artificial Sequence: Synthetic polypeptide"
  source: /note="Heavy Chain Combinations of Telisotuzumab IgG histidine scanning variant #49"
QVQLVQSGAEVKKPGASVKVSCKASGYIFTAYTMHWVRQAPGQGLEWMGWIKPNNGLANYAQKFQGRVTMTRDTSISTAYMELSRLRSDDTAVYYCHRSEIHTEFDHWGQGTLVTVSS

SEQ ID NO: 131 - protein, 111 aa, Artificial Sequence
  source: /note="Description of Artificial Sequence: Synthetic polypeptide"
  source: /note="Light Chain Combinations of Telisotuzumab IgG histidine scanning variant #1"
DIVMTQSPDSLAVSLGERATINCKSSESVDSYAHSHLHWYQQKPGQPPKLLIYRASTRESGVPDRFSGSGSGTDFTLTISSLQAEDVAVYYCQQSKEDPLTFGGGTKVEIK

SEQ ID NO: 132 - protein, 111 aa, Artificial Sequence
  source: /note="Description of Artificial Sequence: Synthetic polypeptide"
  source: /note="Light Chain Combinations of Telisotuzumab IgG histidine scanning variant #2"
DIVMTQSPDSLAVSLGERATINCKSSESVDSYAHSFLHWYQQKPGQPPKLLIYHASTRESGVPDRFSGSGSGTDFTLTISSLQAEDVAVYYCQQSKEDPLTFGGGTKVEIK

SEQ ID NO: 133 - protein, 111 aa, Artificial Sequence
  source: /note="Description of Artificial Sequence: Synthetic polypeptide"
  source: /note="Light Chain Combinations of Telisotuzumab IgG histidine scanning variant #3"
DIVMTQSPDSLAVSLGERATINCKSSESVDSYAHSFLHWYQQKPGQPPKLLIYRASTREHGVPDRFSGSGSGTDFTLTISSLQAEDVAVYYCQQSKEDPLTFGGGTKVEIK

SEQ ID NO: 134 - protein, 111 aa, Artificial Sequence
  source: /note="Description of Artificial Sequence: Synthetic polypeptide"
  source: /note="Light Chain Combinations of Telisotuzumab IgG histidine scanning variant #4"
DIVMTQSPDSLAVSLGERATINCKSSESVDSYANSHLHWYQQKPGQPPKLLIYHASTRESGVPDRFSGSGSGTDFTLTISSLQAEDVAVYYCQQSKEDPLTFGGGTKVEIK

SEQ ID NO: 135 - protein, 111 aa, Artificial Sequence
  source: /note="Description of Artificial Sequence: Synthetic polypeptide"
  source: /note="Light Chain Combinations of Telisotuzumab IgG histidine scanning variant #5"
DIVMTQSPDSLAVSLGERATINCKSSESVDSYANSHLHWYQQKPGQPPKLLIYRASTREHGVPDRFSGSGSGTDFTLTISSLQAEDVAVYYCQQSKEDPLTFGGGTKVEIK

SEQ ID NO: 136 - protein, 111 aa, Artificial Sequence
  source: /note="Description of Artificial Sequence: Synthetic polypeptide"
  source: /note="Light Chain Combinations of Telisotuzumab IgG histidine scanning variant #6"
DIVMTQSPDSLAVSLGERATINCKSSESVDSYANSFLHWYQQKPGQPPKLLIYHASTREHGVPDRFSGSGSGTDFTLTISSLQAEDVAVYYCQQSKEDPLTFGGGTKVEIK

SEQ ID NO: 137 - protein, 111 aa, Artificial Sequence
  source: /note="Description of Artificial Sequence: Synthetic polypeptide"
  source: /note="Light Chain Combinations of Telisotuzumab IgG histidine scanning variant #7"
DIVMTQSPDSLAVSLGERATINCKSSESVDSYAHSHLHWYQQKPGQPPKLLIYHASTRESGVPDRFSGSGSGTDFTLTISSLQAEDVAVYYCQQSKEDPLTFGGGTKVEIK

SEQ ID NO: 138 - protein, 111 aa, Artificial Sequence
  source: /note="Description of Artificial Sequence: Synthetic polypeptide"
  source: /note="Light Chain Combinations of Telisotuzumab IgG histidine scanning variant #8"
DIVMTQSPDSLAVSLGERATINCKSSESVDSYAHSHLHWYQQKPGQPPKLLIYRASTREHGVPDRFSGSGSGTDFTLTISSLQAEDVAVYYCQQSKEDPLTFGGGTKVEIK

SEQ ID NO: 139 - protein, 111 aa, Artificial Sequence
  source: /note="Description of Artificial Sequence: Synthetic polypeptide"
  source: /note="Light Chain Combinations of Telisotuzumab IgG histidine scanning variant #9"
DIVMTQSPDSLAVSLGERATINCKSSESVDSYAHSFLHWYQQKPGQPPKLLIYHASTREHGVPDRFSGSGSGTDFTLTISSLQAEDVAVYYCQQSKEDPLTFGGGTKVEIK

SEQ ID NO: 140 - protein, 111 aa, Artificial Sequence
  source: /note="Description of Artificial Sequence: Synthetic polypeptide"
  source: /note="Light Chain Combinations of Telisotuzumab IgG histidine scanning variant #10"
DIVMTQSPDSLAVSLGERATINCKSSESVDSYANSHLHWYQQKPGQPPKLLIYHASTREHGVPDRFSGSGSGTDFTLTISSLQAEDVAVYYCQQSKEDPLTFGGGTKVEIK

SEQ ID NO: 141 - protein, 111 aa, Artificial Sequence
  source: /note="Description of Artificial Sequence: Synthetic polypeptide"
  source: /note="Light Chain Combinations of Telisotuzumab IgG histidine scanning variant #11"
DIVMTQSPDSLAVSLGERATINCKSSESVDSYAHSFLHWYQQKPGQPPKLLIYRASTRHSGVPDRFSGSGSGTDFTLTISSLQAEDVAVYYCQQSKEDPLTFGGGTKVEIK

SEQ ID NO: 142 - protein, 111 aa, Artificial Sequence
  source: /note="Description of Artificial Sequence: Synthetic polypeptide"
  source: /note="Light Chain Combinations of Telisotuzumab IgG histidine scanning variant #12"
DIVMTQSPDSLAVSLGERATINCKSSESVDSYANSHLHWYQQKPGQPPKLLIYRASTRHSGVPDRFSGSGSGTDFTLTISSLQAEDVAVYYCQQSKEDPLTFGGGTKVEIK

SEQ ID NO: 143 - protein, 111 aa, Artificial Sequence
  source: /note="Description of Artificial Sequence: Synthetic polypeptide"
  source: /note="Light Chain Combinations of Telisotuzumab IgG histidine scanning variant #13"
DIVMTQSPDSLAVSLGERATINCKSSESVDSYANSFHHWYQQKPGQPPKLLIYRASTRHSGVPDRFSGSGSGTDFTLTISSLQAEDVAVYYCQQSKEDPLTFGGGTKVEIK

SEQ ID NO: 144 - protein, 111 aa, Artificial Sequence
  source: /note="Description of Artificial Sequence: Synthetic polypeptide"
  source: /note="Light Chain Combinations of Telisotuzumab IgG histidine scanning variant #14"
DIVMTQSPDSLAVSLGERATINCKSSESVDSYANSFLHWYQQKPGQPPKLLIYHASTRHSGVPDRFSGSGSGTDFTLTISSLQAEDVAVYYCQQSKEDPLTFGGGTKVEIK

SEQ ID NO: 145 - protein, 111 aa, Artificial Sequence
  source: /note="Description of Artificial Sequence: Synthetic polypeptide"
  source: /note="Light Chain Combinations of Telisotuzumab IgG histidine scanning variant #15"
DIVMTQSPDSLAVSLGERATINCKSSESVDSYANSFLHWYQQKPGQPPKLLIYRASTRHHGVPDRFSGSGSGTDFTLTISSLQAEDVAVYYCQQSKEDPLTFGGGTKVEIK

SEQ ID NO: 146 - protein, 115 aa, Artificial Sequence [sequence omitted]

SEQ ID NO: 147 - protein, 108 aa, Artificial Sequence [sequence omitted]

SEQ ID NO: 148 - protein, 10 aa, Artificial Sequence
  source: /note="Description of Artificial Sequence: Synthetic peptide"
  source: /note="Heavy Chain CDR1 of Emibetuzumab"
GYTFTDYYMH

SEQ ID NO: 149 - protein, 17 aa, Artificial Sequence
  source: /note="Description of Artificial Sequence: Synthetic peptide"
  source: /note="Heavy Chain CDR2 of Emibetuzumab"
RVNPNRRGTTYNQKFEG

SEQ ID NO: 150 - protein, 8 aa, Artificial Sequence
  source: /note="Description of Artificial Sequence: Synthetic peptide"
  source: /note="Heavy Chain CDR3 of Emibetuzumab"
ARANWLDY

SEQ ID NO: 151 - protein, 12 aa, Artificial Sequence
  source: /note="Description of Artificial Sequence: Synthetic peptide"
  source: /note="Light Chain CDR1 of Emibetuzumab"
SVSSSVSSIYLH

SEQ ID NO: 152 - protein, 7 aa, Artificial Sequence
  source: /note="Description of Artificial Sequence: Synthetic peptide"
  source: /note="Light Chain CDR2 of Emibetuzumab"
STSNLAS

SEQ ID NO: 153 - protein, 9 aa, Artificial Sequence
  source: /note="Description of Artificial Sequence: Synthetic peptide"
  source: /note="Light Chain CDR3 of Emibetuzumab"
QVYSGYPLT

SEQ ID NO: 154 - protein, 115 aa, Artificial Sequence
  source: /note="Description of Artificial Sequence: Synthetic polypeptide"
  source: /note="Heavy Chain of Emibetuzumab IgG histidine scanning variant #1"
QVQLVQSGAEVKKPGASVKVSCKASHYTFTDYYMHWVRQAPGQGLEWMGRVNPNRRGTTYNQKFEGRVTMTTDTSTSTAYMELRSLRSDDTAVYYCARANWLDYWGQGTTVTVSS

SEQ ID NO: 155 - protein, 115 aa, Artificial Sequence
  source: /note="Description of Artificial Sequence: Synthetic polypeptide"
  source: /note="Heavy Chain of Emibetuzumab IgG histidine scanning variant #2"
QVQLVQSGAEVKKPGASVKVSCKASGHTFTDYYMHWVRQAPGQGLEWMGRVNPNRRGTTYNQKFEGRVTMTTDTSTSTAYMELRSLRSDDTAVYYCARANWLDYWGQGTTVTVSS

SEQ ID NO: 156 - protein, 115 aa, Artificial Sequence
  source: /note="Description of Artificial Sequence: Synthetic polypeptide"
  source: /note="Heavy Chain of Emibetuzumab IgG histidine scanning variant #3"
QVQLVQSGAEVKKPGASVKVSCKASGYHFTDYYMHWVRQAPGQGLEWMGRVNPNRRGTTYNQKFEGRVTMTTDTSTSTAYMELRSLRSDDTAVYYCARANWLDYWGQGTTVTVSS

SEQ ID NO: 157 - protein, 115 aa, Artificial Sequence
  source: /note="Description of Artificial Sequence: Synthetic polypeptide"
  source: /note="Heavy Chain of Emibetuzumab IgG histidine scanning variant #4"
QVQLVQSGAEVKKPGASVKVSCKASGYTHTDYYMHWVRQAPGQGLEWMGRVNPNRRGTTYNQKFEGRVTMTTDTSTSTAYMELRSLRSDDTAVYYCARANWLDYWGQGTTVTVSS

SEQ ID NO: 158 - protein, 115 aa, Artificial Sequence
  source: /note="Description of Artificial Sequence: Synthetic polypeptide"
  source: /note="Heavy Chain of Emibetuzumab IgG histidine scanning variant #5"
QVQLVQSGAEVKKPGASVKVSCKASGYTFHDYYMHWVRQAPGQGLEWMGRVNPNRRGTTYNQKFEGRVTMTTDTSTSTAYMELRSLRSDDTAVYYCARANWLDYWGQGTTVTVSS

SEQ ID NO: 159 - protein, 115 aa, Artificial Sequence
  source: /note="Description of Artificial Sequence: Synthetic polypeptide"
  source: /note="Heavy Chain of Emibetuzumab IgG histidine scanning variant #6"
QVQLVQSGAEVKKPGASVKVSCKASGYTFTHYYMHWVRQAPGQGLEWMGRVNPNRRGTTYNQKFEGRVTMTTDTSTSTAYMELRSLRSDDTAVYYCARANWLDYWGQGTTVTVSS

SEQ ID NO: 160 - protein, 115 aa, Artificial Sequence
  source: /note="Description of Artificial Sequence: Synthetic polypeptide"
  source: /note="Heavy Chain of Emibetuzumab IgG histidine scanning variant #7"
QVQLVQSGAEVKKPGASVKVSCKASGYTFTDHYMHWVRQAPGQGLEWMGRVNPNRRGTTYNQKFEGRVTMTTDTSTSTAYMELRSLRSDDTAVYYCARANWLDYWGQGTTVTVSS

SEQ ID NO: 161 - protein, 115 aa, Artificial Sequence
  source: /note="Description of Artificial Sequence: Synthetic polypeptide"
  source: /note="Heavy Chain of Emibetuzumab IgG histidine scanning variant #8"
QVQLVQSGAEVKKPGASVKVSCKASGYTFTDYHMHWVRQAPGQGLEWMGRVNPNRRGTTYNQKFEGRVTMTTDTSTSTAYMELRSLRSDDTAVYYCARANWLDYWGQGTTVTVSS

SEQ ID NO: 162 - protein, 115 aa, Artificial Sequence
  source: /note="Description of Artificial Sequence: Synthetic polypeptide"
  source: /note="Heavy Chain of Emibetuzumab IgG histidine scanning variant #9"
QVQLVQSGAEVKKPGASVKVSCKASGYTFTDYYHHWVRQAPGQGLEWMGRVNPNRRGTTYNQKFEGRVTMTTDTSTSTAYMELRSLRSDDTAVYYCARANWLDYWGQGTTVTVSS

SEQ ID NO: 163 - protein, 115 aa, Artificial Sequence
  source: /note="Description of Artificial Sequence: Synthetic polypeptide"
  source: /note="Heavy Chain of Emibetuzumab IgG histidine scanning variant #10"
QVQLVQSGAEVKKPGASVKVSCKASGYTFTDYYMAWVRQAPGQGLEWMGRVNPNRRGTTYNQKFEGRVTMTTDTSTSTAYMELRSLRSDDTAVYYCARANWLDYWGQGTTVTVSS

SEQ ID NO: 164 - protein, 115 aa, Artificial Sequence
  source: /note="Description of Artificial Sequence: Synthetic polypeptide"
  source: /note="Heavy Chain of Emibetuzumab IgG histidine scanning variant #11"
QVQLVQSGAEVKKPGASVKVSCKASGYTFTDYYMHWVRQAPGQGLEWMGHVNPNRRGTTYNQKFEGRVTMTTDTSTSTAYMELRSLRSDDTAVYYCARANWLDYWGQGTTVTVSS

SEQ ID NO: 165 - protein, 115 aa, Artificial Sequence
  source: /note="Description of Artificial Sequence: Synthetic polypeptide"
  source: /note="Heavy Chain of Emibetuzumab IgG histidine scanning variant #12"
QVQLVQSGAEVKKPGASVKVSCKASGYTFTDYYMHWVRQAPGQGLEWMGRHNPNRRGTTYNQKFEGRVTMTTDTSTSTAYMELRSLRSDDTAVYYCARANWLDYWGQGTTVTVSS

SEQ ID NO: 166 - protein, 115 aa, Artificial Sequence
  source: /note="Description of Artificial Sequence: Synthetic polypeptide"
  source: /note="Heavy Chain of Emibetuzumab IgG histidine scanning variant #13"
QVQLVQSGAEVKKPGASVKVSCKASGYTFTDYYMHWVRQAPGQGLEWMGRVHPNRRGTTYNQKFEGRVTMTTDTSTSTAYMELRSLRSDDTAVYYCARANWLDYWGQGTTVTVSS

SEQ ID NO: 167 - protein, 115 aa, Artificial Sequence
  source: /note="Description of Artificial Sequence: Synthetic polypeptide"
  source: /note="Heavy Chain of Emibetuzumab IgG histidine scanning variant #14"
QVQLVQSGAEVKKPGASVKVSCKASGYTFTDYYMHWVRQAPGQGLEWMGRVNHNRRGTTYNQKFEGRVTMTTDTSTSTAYMELRSLRSDDTAVYYCARANWLDYWGQGTTVTVSS

SEQ ID NO: 168 - protein, 115 aa, Artificial Sequence
  source: /note="Description of Artificial Sequence: Synthetic polypeptide"
  source: /note="Heavy Chain of Emibetuzumab IgG histidine scanning variant #15"
QVQLVQSGAEVKKPGASVKVSCKASGYTFTDYYMHWVRQAPGQGLEWMGRVNPHRRGTTYNQKFEGRVTMTTDTSTSTAYMELRSLRSDDTAVYYCARANWLDYWGQGTTVTVSS

SEQ ID NO: 169 - protein, 115 aa, Artificial Sequence
  source: /note="Description of Artificial Sequence: Synthetic polypeptide"
  source: /note="Heavy Chain of Emibetuzumab IgG histidine scanning variant #16"
QVQLVQSGAEVKKPGASVKVSCKASGYTFTDYYMHWVRQAPGQGLEWMGRVNPNHRGTTYNQKFEGRVTMTTDTSTSTAYMELRSLRSDDTAVYYCARANWLDYWGQGTTVTVSS

SEQ ID NO: 170 - protein, 115 aa, Artificial Sequence
  source: /note="Description of Artificial Sequence: Synthetic polypeptide"
  source: /note="Heavy Chain of Emibetuzumab IgG histidine scanning variant #17"
QVQLVQSGAEVKKPGASVKVSCKASGYTFTDYYMHWVRQAPGQGLEWMGRVNPNRHGTTYNQKFEGRVTMTTDTSTSTAYMELRSLRSDDTAVYYCARANWLDYWGQGTTVTVSS

SEQ ID NO: 171 - protein, 115 aa, Artificial Sequence
  source: /note="Description of Artificial Sequence: Synthetic polypeptide"
  source: /note="Heavy Chain of Emibetuzumab IgG histidine scanning variant #18"
QVQLVQSGAEVKKPGASVKVSCKASGYTFTDYYMHWVRQAPGQGLEWMGRVNPNRRHTTYNQKFEGRVTMTTDTSTSTAYMELRSLRSDDTAVYYCARANWLDYWGQGTTVTVSS

SEQ ID NO: 172 - protein, 115 aa, Artificial Sequence
  source: /note="Description of Artificial Sequence: Synthetic polypeptide"
  source: /note="Heavy Chain of Emibetuzumab IgG histidine scanning variant #19"
QVQLVQSGAEVKKPGASVKVSCKASGYTFTDYYMHWVRQAPGQGLEWMGRVNPNRRGHTYNQKFEGRVTMTTDTSTSTAYMELRSLRSDDTAVYYCARANWLDYWGQGTTVTVSS

SEQ ID NO: 173 - protein, 115 aa, Artificial Sequence
  source: /note="Description of Artificial Sequence: Synthetic polypeptide"
  source: /note="Heavy Chain of Emibetuzumab IgG histidine scanning variant #20"
QVQLVQSGAEVKKPGASVKVSCKASGYTFTDYYMHWVRQAPGQGLEWMGRVNPNRRGTHYNQKFEGRVTMTTDTSTSTAYMELRSLRSDDTAVYYCARANWLDYWGQGTTVTVSS

SEQ ID NO: 174 - protein, 115 aa, Artificial Sequence
  source: /note="Description of Artificial Sequence: Synthetic polypeptide"
  source: /note="Heavy Chain of Emibetuzumab IgG histidine scanning variant #21"
QVQLVQSGAEVKKPGASVKVSCKASGYTFTDYYMHWVRQAPGQGLEWMGRVNPNRRGTTHNQKFEGRVTMTTDTSTSTAYMELRSLRSDDTAVYYCARANWLDYWGQGTTVTVSS

SEQ ID NO: 175 - protein, 115 aa, Artificial Sequence
  source: /note="Description of Artificial Sequence: Synthetic polypeptide"
  source: /note="Heavy Chain of Emibetuzumab IgG histidine scanning variant #22"
QVQLVQSGAEVKKPGASVKVSCKASGYTFTDYYMHWVRQAPGQGLEWMGRVNPNRRGTTYHQKFEGRVTMTTDTSTSTAYMELRSLRSDDTAVYYCARANWLDYWGQGTTVTVSS

SEQ ID NO: 176 - protein, 115 aa, Artificial Sequence
  source: /note="Description of Artificial Sequence: Synthetic polypeptide"
  source: /note="Heavy Chain of Emibetuzumab IgG histidine scanning variant #23"
QVQLVQSGAEVKKPGASVKVSCKASGYTFTDYYMHWVRQAPGQGLEWMGRVNPNRRGTTYNHKFEGRVTMTTDTSTSTAYMELRSLRSDDTAVYYCARANWLDYWGQGTTVTVSS

SEQ ID NO: 177 - protein, 115 aa, Artificial Sequence
  source: /note="Description of Artificial Sequence: Synthetic polypeptide"
  source: /note="Heavy Chain of Emibetuzumab IgG histidine scanning variant #24"
QVQLVQSGAEVKKPGASVKVSCKASGYTFTDYYMHWVRQAPGQGLEWMGRVNPNRRGTTYNQHFEGRVTMTTDTSTSTAYMELRSLRSDDTAVYYCARANWLDYWGQGTTVTVSS

SEQ ID NO: 178 - protein, 115 aa, Artificial Sequence
  source: /note="Description of Artificial Sequence: Synthetic polypeptide"
  source: /note="Heavy Chain of Emibetuzumab IgG histidine scanning variant #25"
QVQLVQSGAEVKKPGASVKVSCKASGYTFTDYYMHWVRQAPGQGLEWMGRVNPNRRGTTYNQKHEGRVTMTTDTSTSTAYMELRSLRSDDTAVYYCARANWLDYWGQGTTVTVSS

SEQ ID NO: 179 - protein, 115 aa, Artificial Sequence
  source: /note="Description of Artificial Sequence: Synthetic polypeptide"
  source: /note="Heavy Chain of Emibetuzumab IgG histidine scanning variant #26"
QVQLVQSGAEVKKPGASVKVSCKASGYTFTDYYMHWVRQAPGQGLEWMGRVNPNRRGTTYNQKFHGRVTMTTDTSTSTAYMELRSLRSDDTAVYYCARANWLDYWGQGTTVTVSS

SEQ ID NO: 180 - protein, 115 aa, Artificial Sequence
  source: /note="Description of Artificial Sequence: Synthetic polypeptide"
  source: /note="Heavy Chain of Emibetuzumab IgG histidine scanning variant #27"
QVQLVQSGAEVKKPGASVKVSCKASGYTFTDYYMHWVRQAPGQGLEWMGRVNPNRRGTTYNQKFEHRVTMTTDTSTSTAYMELRSLRSDDTAVYYCARANWLDYWGQGTTVTVSS

SEQ ID NO: 181 - protein, 115 aa, Artificial Sequence
  source: /note="Description of Artificial Sequence: Synthetic polypeptide"
  source: /note="Heavy Chain of Emibetuzumab IgG histidine scanning variant #28"
QVQLVQSGAEVKKPGASVKVSCKASGYTFTDYYMHWVRQAPGQGLEWMGRVNPNRRGTTYNQKFEGRVTMTTDTSTSTAYMELRSLRSDDTAVYYCHRANWLDYWGQGTTVTVSS

SEQ ID NO: 182 - protein, 115 aa, Artificial Sequence
  source: /note="Description of Artificial Sequence: Synthetic polypeptide"
  source: /note="Heavy Chain of Emibetuzumab IgG histidine scanning variant #29"
QVQLVQSGAEVKKPGASVKVSCKASGYTFTDYYMHWVRQAPGQGLEWMGRVNPNRRGTTYNQKFEGRVTMTTDTSTSTAYMELRSLRSDDTAVYYCAHANWLDYWGQGTTVTVSS

SEQ ID NO: 183 - protein, 115 aa, Artificial Sequence
  source: /note="Description of Artificial Sequence: Synthetic polypeptide"
  source: /note="Heavy Chain of Emibetuzumab IgG histidine scanning variant #30"
QVQLVQSGAEVKKPGASVKVSCKASGYTFTDYYMHWVRQAPGQGLEWMGRVNPNRRGTTYNQKFEGRVTMTTDTSTSTAYMELRSLRSDDTAVYYCARHNWLDYWGQGTTVTVSS

SEQ ID NO: 184 - protein, 115 aa, Artificial Sequence
  source: /note="Description of Artificial Sequence: Synthetic polypeptide"
  source: /note="Heavy Chain of Emibetuzumab IgG histidine scanning variant #31"
QVQLVQSGAEVKKPGASVKVSCKASGYTFTDYYMHWVRQAPGQGLEWMGRVNPNRRGTTYNQKFEGRVTMTTDTSTSTAYMELRSLRSDDTAVYYCARAHWLDYWGQGTTVTVSS

SEQ ID NO: 185 - protein, 115 aa, Artificial Sequence
  source: /note="Description of Artificial Sequence: Synthetic polypeptide"
  source: /note="Heavy Chain of Emibetuzumab IgG histidine scanning variant #32"
QVQLVQSGAEVKKPGASVKVSCKASGYTFTDYYMHWVRQAPGQGLEWMGRVNPNRRGTTYNQKFEGRVTMTTDTSTSTAYMELRSLRSDDTAVYYCARANHLDYWGQGTTVTVSS

SEQ ID NO: 186 - protein, 115 aa, Artificial Sequence
  source: /note="Description of Artificial Sequence: Synthetic polypeptide"
  source: /note="Heavy Chain of Emibetuzumab IgG histidine scanning variant #33"
QVQLVQSGAEVKKPGASVKVSCKASGYTFTDYYMHWVRQAPGQGLEWMGRVNPNRRGTTYNQKFEGRVTMTTDTSTSTAYMELRSLRSDDTAVYYCARANWHDYWGQGTTVTVSS

SEQ ID NO: 187 - protein, 115 aa, Artificial Sequence
  source: /note="Description of Artificial Sequence: Synthetic polypeptide"
  source: /note="Heavy Chain of Emibetuzumab IgG histidine scanning variant #34"
QVQLVQSGAEVKKPGASVKVSCKASGYTFTDYYMHWVRQAPGQGLEWMGRVNPNRRGTTYNQKFEGRVTMTTDTSTSTAYMELRSLRSDDTAVYYCARANWLHYWGQGTTVTVSS

SEQ ID NO: 188 - protein, 115 aa, Artificial Sequence
  source: /note="Description of Artificial Sequence: Synthetic polypeptide"
  source: /note="Heavy Chain of Emibetuzumab IgG histidine scanning variant #35"
QVQLVQSGAEVKKPGASVKVSCKASGYTFTDYYMHWVRQAPGQGLEWMGRVNPNRRGTTYNQKFEGRVTMTTDTSTSTAYMELRSLRSDDTAVYYCARANWLDHWGQGTTVTVSS

SEQ ID NO: 189 - protein, 108 aa, Artificial Sequence
  source: /note="Description of Artificial Sequence: Synthetic polypeptide"
  source: /note="Light Chain of Emibetuzumab IgG histidine scanning variant #1"
DIQMTQSPSSLSASVGDRVTITCHVSSSVSSIYLHWYQQKPGKAPKLLIYSTSNLASGVPSRFSGSGSGTDFTLTISSLQPEDFATYYCQVYSGYPLTFGGGTKVEIK

SEQ ID NO: 190 - protein, 108 aa, Artificial Sequence
  source: /note="Description of Artificial Sequence: Synthetic polypeptide"
  source: /note="Light Chain of Emibetuzumab IgG histidine scanning variant #2"
DIQMTQSPSSLSASVGDRVTITCSHSSSVSSIYLHWYQQKPGKAPKLLIYSTSNLASGVPSRFSGSGSGTDFTLTISSLQPEDFATYYCQVYSGYPLTFGGGTKVEIK

SEQ ID NO: 191 - protein, 108 aa, Artificial Sequence
  source: /note="Description of Artificial Sequence: Synthetic polypeptide"
  source: /note="Light Chain of Emibetuzumab IgG histidine scanning variant #3"
DIQMTQSPSSLSASVGDRVTITCSVHSSVSSIYLHWYQQKPGKAPKLLIYSTSNLASGVPSRFSGSGSGTDFTLTISSLQPEDFATYYCQVYSGYPLTFGGGTKVEIK

SEQ ID NO: 192 - protein, 108 aa, Artificial Sequence
  source: /note="Description of Artificial Sequence: Synthetic polypeptide"
  source: /note="Light Chain of Emibetuzumab IgG histidine scanning variant #4"
DIQMTQSPSSLSASVGDRVTITCSVSHSVSSIYLHWYQQKPGKAPKLLIYSTSNLASGVPSRFSGSGSGTDFTLTISSLQPEDFATYYCQVYSGYPLTFGGGTKVEIK

SEQ ID NO: 193 - protein, 108 aa, Artificial Sequence
  source: /note="Description of Artificial Sequence: Synthetic polypeptide"
  source: /note="Light Chain of Emibetuzumab IgG histidine scanning variant #5"
DIQMTQSPSSLSASVGDRVTITCSVSSHVSSIYLHWYQQKPGKAPKLLIYSTSNLASGVPSRFSGSGSGTDFTLTISSLQPEDFATYYCQVYSGYPLTFGGGTKVEIK

SEQ ID NO: 194 - protein, 108 aa, Artificial Sequence
  source: /note="Description of Artificial Sequence: Synthetic polypeptide"
  source: /note="Light Chain of Emibetuzumab IgG histidine scanning variant #6"
DIQMTQSPSSLSASVGDRVTITCSVSSSHSSIYLHWYQQKPGKAPKLLIYSTSNLASGVPSRFSGSGSGTDFTLTISSLQPEDFATYYCQVYSGYPLTFGGGTKVEIK

SEQ ID NO: 195 - protein, 108 aa, Artificial Sequence
  source: /note="Description of Artificial Sequence: Synthetic polypeptide"
  source: /note="Light Chain of Emibetuzumab IgG histidine scanning variant #7"
DIQMTQSPSSLSASVGDRVTITCSVSSSVHSIYLHWYQQKPGKAPKLLIYSTSNLASGVPSRFSGSGSGTDFTLTISSLQPEDFATYYCQVYSGYPLTFGGGTKVEIK

SEQ ID NO: 196 - protein, 108 aa, Artificial Sequence
  source: /note="Description of Artificial Sequence: Synthetic polypeptide"
  source: /note="Light Chain of Emibetuzumab IgG histidine scanning variant #8"
DIQMTQSPSSLSASVGDRVTITCSVSSSVSHIYLHWYQQKPGKAPKLLIYSTSNLASGVPSRFSGSGSGTDFTLTISSLQPEDFATYYCQVYSGYPLTFGGGTKVEIK

SEQ ID NO: 197 - protein, 108 aa, Artificial Sequence
  source: /note="Description of Artificial Sequence: Synthetic polypeptide"
  source: /note="Light Chain of Emibetuzumab IgG histidine scanning variant #9"
DIQMTQSPSSLSASVGDRVTITCSVSSSVSSHYLHWYQQKPGKAPKLLIYSTSNLASGVPSRFSGSGSGTDFTLTISSLQPEDFATYYCQVYSGYPLTFGGGTKVEIK

SEQ ID NO: 198 - protein, 108 aa, Artificial Sequence
  source: /note="Description of Artificial Sequence: Synthetic polypeptide"
  source: /note="Light Chain of Emibetuzumab IgG histidine scanning variant #10"
DIQMTQSPSSLSASVGDRVTITCSVSSSVSSIHLHWYQQKPGKAPKLLIYSTSNLASGVPSRFSGSGSGTDFTLTISSLQPEDFATYYCQVYSGYPLTFGGGTKVEIK

SEQ ID NO: 199 - protein, 108 aa, Artificial Sequence
  source: /note="Description of Artificial Sequence: Synthetic polypeptide"
  source: /note="Light Chain of Emibetuzumab IgG histidine scanning variant #11"
DIQMTQSPSSLSASVGDRVTITCSVSSSVSSIYHHWYQQKPGKAPKLLIYSTSNLASGVPSRFSGSGSGTDFTLTISSLQPEDFATYYCQVYSGYPLTFGGGTKVEIK

SEQ ID NO: 200 - protein, 108 aa, Artificial Sequence
  source: /note="Description of Artificial Sequence: Synthetic polypeptide"
  source: /note="Light Chain of Emibetuzumab IgG histidine scanning variant #12"
DIQMTQSPSSLSASVGDRVTITCSVSSSVSSIYLAWYQQKPGKAPKLLIYSTSNLASGVPSRFSGSGSGTDFTLTISSLQPEDFATYYCQVYSGYPLTFGGGTKVEIK

SEQ ID NO: 201 - protein, 108 aa, Artificial Sequence
  source: /note="Description of Artificial Sequence: Synthetic polypeptide"
  source: /note="Light Chain of Emibetuzumab IgG histidine scanning variant #13"
DIQMTQSPSSLSASVGDRVTITCSVSSSVSSIYLHWYQQKPGKAPKLLIYHTSNLASGVPSRFSGSGSGTDFTLTISSLQPEDFATYYCQVYSGYPLTFGGGTKVEIK

SEQ ID NO: 202 - protein, 108 aa, Artificial Sequence
  source: /note="Description of Artificial Sequence: Synthetic polypeptide"
  source: /note="Light Chain of Emibetuzumab IgG histidine scanning variant #14"
DIQMTQSPSSLSASVGDRVTITCSVSSSVSSIYLHWYQQKPGKAPKLLIYSHSNLASGVPSRFSGSGSGTDFTLTISSLQPEDFATYYCQVYSGYPLTFGGGTKVEIK

SEQ ID NO: 203 - protein, 108 aa, Artificial Sequence
  source: /note="Description of Artificial Sequence: Synthetic polypeptide"
  source: /note="Light Chain of Emibetuzumab IgG histidine scanning variant #15"
DIQMTQSPSSLSASVGDRVTITCSVSSSVSSIYLHWYQQKPGKAPKLLIYSTHNLASGVPSRFSGSGSGTDFTLTISSLQPEDFATYYCQVYSGYPLTFGGGTKVEIK

SEQ ID NO: 204 - protein, 108 aa, Artificial Sequence
  source: /note="Description of Artificial Sequence: Synthetic polypeptide"
  source: /note="Light Chain of Emibetuzumab IgG histidine scanning variant #16"
DIQMTQSPSSLSASVGDRVTITCSVSSSVSSIYLHWYQQKPGKAPKLLIYSTSHLASGVPSRFSGSGSGTDFTLTISSLQPEDFATYYCQVYSGYPLTFGGGTKVEIK

SEQ ID NO: 205 - protein, 108 aa, Artificial Sequence
  source: /note="Description of Artificial Sequence: Synthetic polypeptide"
  source: /note="Light Chain of Emibetuzumab IgG histidine scanning variant #17"
DIQMTQSPSSLSASVGDRVTITCSVSSSVSSIYLHWYQQKPGKAPKLLIYSTSNHASGVPSRFSGSGSGTDFTLTISSLQPEDFATYYCQVYSGYPLTFGGGTKVEIK

SEQ ID NO: 206 - protein, 108 aa, Artificial Sequence
  source: /note="Description of Artificial Sequence: Synthetic polypeptide"
  source: /note="Light Chain of Emibetuzumab IgG histidine scanning variant #18"
DIQMTQSPSSLSASVGDRVTITCSVSSSVSSIYLHWYQQKPGKAPKLLIYSTSNLHSGVPSRFSGSGSGTDFTLTISSLQPEDFATYYCQVYSGYPLTFGGGTKVEIK

SEQ ID NO: 207 - protein, 108 aa, Artificial Sequence
  source: /note="Description of Artificial Sequence: Synthetic polypeptide"
  source: /note="Light Chain of Emibetuzumab IgG histidine scanning variant #19"
DIQMTQSPSSLSASVGDRVTITCSVSSSVSSIYLHWYQQKPGKAPKLLIYSTSNLAHGVPSRFSGSGSGTDFTLTISSLQPEDFATYYCQVYSGYPLTFGGGTKVEIK

SEQ ID NO: 208 - protein, 108 aa, Artificial Sequence
  source: /note="Description of Artificial Sequence: Synthetic polypeptide"
  source: /note="Light Chain of Emibetuzumab IgG histidine scanning variant #20"
DIQMTQSPSSLSASVGDRVTITCSVSSSVSSIYLHWYQQKPGKAPKLLIYSTSNLASGVPSRFSGSGSGTDFTLTISSLQPEDFATYYCHVYSGYPLTFGGGTKVEIK

SEQ ID NO: 209 - protein, 108 aa, Artificial Sequence
  source: /note="Description of Artificial Sequence: Synthetic polypeptide"
  source: /note="Light Chain of Emibetuzumab IgG histidine scanning variant #21"
DIQMTQSPSSLSASVGDRVTITCSVSSSVSSIYLHWYQQKPGKAPKLLIYSTSNLASGVPSRFSGSGSGTDFTLTISSLQPEDFATYYCQHYSGYPLTFGGGTKVEIK

SEQ ID NO: 210 - protein, 108 aa, Artificial Sequence
  source: /note="Description of Artificial Sequence: Synthetic polypeptide"
  source: /note="Light Chain of Emibetuzumab IgG histidine scanning variant #22"
DIQMTQSPSSLSASVGDRVTITCSVSSSVSSIYLHWYQQKPGKAPKLLIYSTSNLASGVPSRFSGSGSGTDFTLTISSLQPEDFATYYCQVHSGYPLTFGGGTKVEIK

SEQ ID NO: 211 - protein, 108 aa, Artificial Sequence
  source: /note="Description of Artificial Sequence: Synthetic polypeptide"
  source: /note="Light Chain of Emibetuzumab IgG histidine scanning variant #23"
DIQMTQSPSSLSASVGDRVTITCSVSSSVSSIYLHWYQQKPGKAPKLLIYSTSNLASGVPSRFSGSGSGTDFTLTISSLQPEDFATYYCQVYHGYPLTFGGGTKVEIK

SEQ ID NO: 212 - protein, 108 aa, Artificial Sequence
  source: /note="Description of Artificial Sequence: Synthetic polypeptide"
  source: /note="Light Chain of Emibetuzumab IgG histidine scanning variant #24"
DIQMTQSPSSLSASVGDRVTITCSVSSSVSSIYLHWYQQKPGKAPKLLIYSTSNLASGVPSRFSGSGSGTDFTLTISSLQPEDFATYYCQVYSHYPLTFGGGTKVEIK

SEQ ID NO: 213 - protein, 108 aa, Artificial Sequence
  source: /note="Description of Artificial Sequence: Synthetic polypeptide"
  source: /note="Light Chain of Emibetuzumab IgG histidine scanning variant #25"
DIQMTQSPSSLSASVGDRVTITCSVSSSVSSIYLHWYQQKPGKAPKLLIYSTSNLASGVPSRFSGSGSGTDFTLTISSLQPEDFATYYCQVYSGHPLTFGGGTKVEIK

SEQ ID NO: 214 - protein, 108 aa, Artificial Sequence
  source: /note="Description of Artificial Sequence: Synthetic polypeptide"
  source: /note="Light Chain of Emibetuzumab IgG histidine scanning variant #26"
DIQMTQSPSSLSASVGDRVTITCSVSSSVSSIYLHWYQQKPGKAPKLLIYSTSNLASGVPSRFSGSGSGTDFTLTISSLQPEDFATYYCQVYSGYHLTFGGGTKVEIK

SEQ ID NO: 215 - protein, 108 aa, Artificial Sequence
  source: /note="Description of Artificial Sequence: Synthetic polypeptide"
  source: /note="Light Chain of Emibetuzumab IgG histidine scanning variant #27"
DIQMTQSPSSLSASVGDRVTITCSVSSSVSSIYLHWYQQKPGKAPKLLIYSTSNLASGVPSRFSGSGSGTDFTLTISSLQPEDFATYYCQVYSGYPHTFGGGTKVEIK

SEQ ID NO: 216 - protein, 108 aa, Artificial Sequence
  source: /note="Description of Artificial Sequence: Synthetic polypeptide"
  source: /note="Light Chain of Emibetuzumab IgG histidine scanning variant #28"
DIQMTQSPSSLSASVGDRVTITCSVSSSVSSIYLHWYQQKPGKAPKLLIYSTSNLASGVPSRFSGSGSGTDFTLTISSLQPEDFATYYCQVYSGYPLHFGGGTKVEIK

SEQ ID NO: 217 - protein, 115 aa, Artificial Sequence
  source: /note="Description of Artificial Sequence: Synthetic polypeptide"
  source: /note="Heavy Chain Combinations of Emibetuzumab IgG histidine scanning variant #1"
QVQLVQSGAEVKKPGASVKVSCKASGYTFTHYYMHWVRQAPGQGLEWMGRVHPNRRGTTYNQKFEGRVTMTTDTSTSTAYMELRSLRSDDTAVYYCARANWLDYWGQGTTVTVSS

SEQ ID NO: 218 - protein, 115 aa, Artificial Sequence
  source: /note="Description of Artificial Sequence: Synthetic polypeptide"
  source: /note="Heavy Chain Combinations of Emibetuzumab IgG histidine scanning variant #2"
QVQLVQSGAEVKKPGASVKVSCKASGYTFTHYYMHWVRQAPGQGLEWMGRVNPHRRGTTYNQKFEGRVTMTTDTSTSTAYMELRSLRSDDTAVYYCARANWLDYWGQGTTVTVSS

SEQ ID NO: 219 - protein, 115 aa, Artificial Sequence
  source: /note="Description of Artificial Sequence: Synthetic polypeptide"
  source: /note="Heavy Chain Combinations of Emibetuzumab IgG histidine scanning variant #3"
QVQLVQSGAEVKKPGASVKVSCKASGYTFTHYYMHWVRQAPGQGLEWMGRVNPNRRHTTYNQKFEGRVTMTTDTSTSTAYMELRSLRSDDTAVYYCARANWLDYWGQGTTVTVSS

SEQ ID NO: 220 - protein, 115 aa, Artificial Sequence
  source: /note="Description of Artificial Sequence: Synthetic polypeptide"
  source: /note="Heavy Chain Combinations of Emibetuzumab IgG histidine scanning variant #4"
QVQLVQSGAEVKKPGASVKVSCKASGYTFTHYYMHWVRQAPGQGLEWMGRVNPNRRGTTYNQKFEGRVTMTTDTSTSTAYMELRSLRSDDTAVYYCARAHWLDYWGQGTTVTVSS

SEQ ID NO: 221 - protein, 115 aa, Artificial Sequence
  source: /note="Description of Artificial Sequence: Synthetic polypeptide"
  source: /note="Heavy Chain Combinations of Emibetuzumab IgG histidine scanning variant #5"
QVQLVQSGAEVKKPGASVKVSCKASGYTFTDYYMHWVRQAPGQGLEWMGRVHPHRRGTTYNQKFEGRVTMTTDTSTSTAYMELRSLRSDDTAVYYCARANWLDYWGQGTTVTVSS

SEQ ID NO: 222 - protein, 115 aa, Artificial Sequence
  source: /note="Description of Artificial Sequence: Synthetic polypeptide"
  source: /note="Heavy Chain Combinations of Emibetuzumab IgG histidine scanning variant #6"
QVQLVQSGAEVKKPGASVKVSCKASGYTFTDYYMHWVRQAPGQGLEWMGRVHPNRRHTTYNQKFEGRVTMTTDTSTSTAYMELRSLRSDDTAVYYCARANWLDYWGQGTTVTVSS

SEQ ID NO: 223 - protein, 115 aa, Artificial Sequence
  source: /note="Description of Artificial Sequence: Synthetic polypeptide"
  source: /note="Heavy Chain Combinations of Emibetuzumab IgG histidine scanning variant #7"
QVQLVQSGAEVKKPGASVKVSCKASGYTFTDYYMHWVRQAPGQGLEWMGRVHPNRRGTTYNQKFEGRVTMTTDTSTSTAYMELRSLRSDDTAVYYCARAHWLDYWGQGTTVTVSS

SEQ ID NO: 224 - protein, 115 aa, Artificial Sequence
  source: /note="Description of Artificial Sequence: Synthetic polypeptide"
  source: /note="Heavy Chain Combinations of Emibetuzumab IgG histidine scanning variant #8"
QVQLVQSGAEVKKPGASVKVSCKASGYTFTDYYMHWVRQAPGQGLEWMGRVNPHRRHTTYNQKFEGRVTMTTDTSTSTAYMELRSLRSDDTAVYYCARANWLDYWGQGTTVTVSS

SEQ ID NO: 225 - protein, 115 aa, Artificial Sequence
  source: /note="Description of Artificial Sequence: Synthetic polypeptide"
  source: /note="Heavy Chain Combinations of Emibetuzumab IgG histidine scanning variant #9"
QVQLVQSGAEVKKPGASVKVSCKASGYTFTDYYMHWVRQAPGQGLEWMGRVNPHRRGTTYNQKFEGRVTMTTDTSTSTAYMELRSLRSDDTAVYYCARAHWLDYWGQGTTVTVSS

SEQ ID NO: 226 - protein, 115 aa, Artificial Sequence
  source: /note="Description of Artificial Sequence: Synthetic polypeptide"
  source: /note="Heavy Chain Combinations of Emibetuzumab IgG histidine scanning variant #10"
QVQLVQSGAEVKKPGASVKVSCKASGYTFTDYYMHWVRQAPGQGLEWMGRVNPNRRHTTYNQKFEGRVTMTTDTSTSTAYMELRSLRSDDTAVYYCARAHWLDYWGQGTTVTVSS

SEQ ID NO: 227 - protein, 115 aa, Artificial Sequence
  source: /note="Description of Artificial Sequence: Synthetic polypeptide"
  source: /note="Heavy Chain Combinations of Emibetuzumab IgG histidine scanning variant #11"
QVQLVQSGAEVKKPGASVKVSCKASGYTFTHYYMHWVRQAPGQGLEWMGRVHPHRRGTTYNQKFEGRVTMTTDTSTSTAYMELRSLRSDDTAVYYCARANWLDYWGQGTTVTVSS

SEQ ID NO: 228 - protein, 115 aa, Artificial Sequence
  source: /note="Description of Artificial Sequence: Synthetic polypeptide"
  source: /note="Heavy Chain Combinations of Emibetuzumab IgG histidine scanning variant #12"
QVQLVQSGAEVKKPGASVKVSCKASGYTFTHYYMHWVRQAPGQGLEWMGRVHPNRRHTTYNQKFEGRVTMTTDTSTSTAYMELRSLRSDDTAVYYCARANWLDYWGQGTTVTVSS

SEQ ID NO: 229 - protein, 115 aa, Artificial Sequence
  source: /note="Description of Artificial Sequence: Synthetic polypeptide"
  source: /note="Heavy Chain Combinations of Emibetuzumab IgG histidine scanning variant #13"
QVQLVQSGAEVKKPGASVKVSCKASGYTFTHYYMHWVRQAPGQGLEWMGRVHPNRRGTTYNQKFEGRVTMTTDTSTSTAYMELRSLRSDDTAVYYCARAHWLDYWGQGTTVTVSS

SEQ ID NO: 230 - protein, 115 aa, Artificial Sequence
  source: /note="Description of Artificial Sequence: Synthetic polypeptide"
  source: /note="Heavy Chain Combinations of Emibetuzumab IgG histidine scanning variant #14"
QVQLVQSGAEVKKPGASVKVSCKASGYTFTHYYMHWVRQAPGQGLEWMGRVNPHRRHTTYNQKFEGRVTMTTDTSTSTAYMELRSLRSDDTAVYYCARANWLDYWGQGTTVTVSS

SEQ ID NO: 231 - protein, 115 aa, Artificial Sequence
  source: /note="Description of Artificial Sequence: Synthetic polypeptide"
  source: /note="Heavy Chain Combinations of Emibetuzumab IgG histidine scanning variant #15"
QVQLVQSGAEVKKPGASVKVSCKASGYTFTHYYMHWVRQAPGQGLEWMGRVNPHRRGTTYNQKFEGRVTMTTDTSTSTAYMELRSLRSDDTAVYYCARAHWLDYWGQGTTVTVSS

SEQ ID NO: 232 - protein, 115 aa, Artificial Sequence
  source: /note="Description of Artificial Sequence: Synthetic polypeptide"
  source: /note="Heavy Chain Combinations of Emibetuzumab IgG histidine scanning variant #16"
QVQLVQSGAEVKKPGASVKVSCKASGYTFTHYYMHWVRQAPGQGLEWMGRVNPNRRHTTYNQKFEGRVTMTTDTSTSTAYMELRSLRSDDTAVYYCARAHWLDYWGQGTTVTVSS

SEQ ID NO: 233 - protein, 115 aa, Artificial Sequence
  source: /note="Description of Artificial Sequence: Synthetic polypeptide"
  source: /note="Heavy Chain Combinations of Emibetuzumab IgG histidine scanning variant #17"
QVQLVQSGAEVKKPGASVKVSCKASGYTFTDYYMHWVRQAPGQGLEWMGRVHPHRRHTTYNQKFEGRVTMTTDTSTSTAYMELRSLRSDDTAVYYCARANWLDYWGQGTTVTVSS

SEQ ID NO: 234 - protein, 115 aa, Artificial Sequence
  source: /note="Description of Artificial Sequence: Synthetic polypeptide"
  source: /note="Heavy Chain Combinations of Emibetuzumab IgG histidine scanning variant #18"
QVQLVQSGAEVKKPGASVKVSCKASGYTFTDYYMHWVRQAPGQGLEWMGRVHPHRRGTTYNQKFEGRVTMTTDTSTSTAYMELRSLRSDDTAVYYCARAHWLDYWGQGTTVTVSS

SEQ ID NO: 235 - protein, 115 aa, Artificial Sequence
  source: /note="Description of Artificial Sequence: Synthetic polypeptide"
  source: /note="Heavy Chain Combinations of Emibetuzumab IgG histidine scanning variant #19"
QVQLVQSGAEVKKPGASVKVSCKASGYTFTDYYMHWVRQAPGQGLEWMGRVHPNRRHTTYNQKFEGRVTMTTDTSTSTAYMELRSLRSDDTAVYYCARAHWLDYWGQGTTVTVSS

SEQ ID NO: 236 - protein, 115 aa, Artificial Sequence
  source: /note="Description of Artificial Sequence: Synthetic polypeptide"
  source: /note="Heavy Chain Combinations of Emibetuzumab IgG histidine scanning variant #20"
QVQLVQSGAEVKKPGASVKVSCKASGYTFTDYYMHWVRQAPGQGLEWMGRVNPHRRHTTYNQKFEGRVTMTTDTSTSTAYMELRSLRSDDTAVYYCARAHWLDYWGQGTTVTVSS

SEQ ID NO: 237 - protein, 115 aa, Artificial Sequence
  source: /note="Description of Artificial Sequence: Synthetic polypeptide"
  source: /note="Heavy Chain Combinations of Emibetuzumab IgG histidine scanning variant #21"
QVQLVQSGAEVKKPGASVKVSCKASGYTFTHYYMHWVRQAPGQGLEWMGRVNHNRRGTTYNQKFEGRVTMTTDTSTSTAYMELRSLRSDDTAVYYCARANWLDYWGQGTTVTVSS

SEQ ID NO: 238 - protein, 115 aa, Artificial Sequence
  source: /note="Description of Artificial Sequence: Synthetic polypeptide"
  source: /note="Heavy Chain Combinations of Emibetuzumab IgG histidine scanning variant #22"
QVQLVQSGAEVKKPGASVKVSCKASGYTFTDYYMHWVRQAPGQGLEWMGRVHHNRRGTTYNQKFEGRVTMTTDTSTSTAYMELRSLRSDDTAVYYCARANWLDYWGQGTTVTVSS

SEQ ID NO: 239 - protein, 115 aa, Artificial Sequence
  source: /note="Description of Artificial Sequence: Synthetic polypeptide"
  source: /note="Heavy Chain Combinations of Emibetuzumab IgG histidine scanning variant #23"
QVQLVQSGAEVKKPGASVKVSCKASGYTFTHYYMHWVRQAPGQGLEWMGRVNPNRRGTTYNQKFEGRVTMTTDTSTSTAYMELRSLRSDDTAVYYCARHNWLDYWGQGTTVTVSS

SEQ ID NO: 240 - protein, 115 aa, Artificial Sequence
  source: /note="Description of Artificial Sequence: Synthetic polypeptide"
  source: /note="Heavy Chain Combinations of Emibetuzumab IgG histidine scanning variant #24"
QVQLVQSGAEVKKPGASVKVSCKASGYTFTDYYMHWVRQAPGQGLEWMGRVHPNRRGTTYNQKFEGRVTMTTDTSTSTAYMELRSLRSDDTAVYYCARHNWLDYWGQGTTVTVSS

SEQ ID NO: 241 - protein, 115 aa, Artificial Sequence
  source: /note="Description of Artificial Sequence: Synthetic polypeptide"
  source: /note="Heavy Chain Combinations of Emibetuzumab IgG histidine scanning variant #25"
QVQLVQSGAEVKKPGASVKVSCKASGYTFTDYYMHWVRQAPGQGLEWMGRVNHNRRGTTYNQKFEGRVTMTTDTSTSTAYMELRSLRSDDTAVYYCARHNWLDYWGQGTTVTVSS

SEQ ID NO: 242 - protein, 115 aa, Artificial Sequence
  source: /note="Description of Artificial Sequence: Synthetic polypeptide"
  source: /note="Heavy Chain Combinations of Emibetuzumab IgG histidine scanning variant #26"
QVQLVQSGAEVKKPGASVKVSCKASGYTFTHYYMHWVRQAPGQGLEWMGRVNHNRRGTTYNQKFEGRVTMTTDTSTSTAYMELRSLRSDDTAVYYCARHNWLDYWGQGTTVTVSS

SEQ ID NO: 243 - protein, 115 aa, Artificial Sequence
  source: /note="Description of Artificial Sequence: Synthetic polypeptide"
  source: /note="Heavy Chain Combinations of Emibetuzumab IgG histidine scanning variant #27"
QVQLVQSGAEVKKPGASVKVSCKASGYTFTDYYMHWVRQAPGQGLEWMGRVHHNRRGTTYNQKFEGRVTMTTDTSTSTAYMELRSLRSDDTAVYYCARHNWLDYWGQGTTVTVSS

SEQ ID NO: 244 - protein, 115 aa, Artificial Sequence
  source: /note="Description of Artificial Sequence: Synthetic polypeptide"
  source: /note="Heavy Chain Combinations of Emibetuzumab IgG histidine scanning variant #28"
QVQLVQSGAEVKKPGASVKVSCKASGYTFTHYYMHWVRQAPGQGLEWMGRVHHNRRGTTYNQKFEGRVTMTTDTSTSTAYMELRSLRSDDTAVYYCARANWLDYWGQGTTVTVSS

SEQ ID NO: 245 - protein, 115 aa, Artificial Sequence
  source: /note="Description of Artificial Sequence: Synthetic polypeptide"
  source: /note="Heavy Chain Combinations of Emibetuzumab IgG histidine scanning variant #29"
QVQLVQSGAEVKKPGASVKVSCKASGYTFTHYYMHWVRQAPGQGLEWMGRVNHHRRGTTYNQKFEGRVTMTTDTSTSTAYMELRSLRSDDTAVYYCARANWLDYWGQGTTVTVSS

SEQ ID NO: 246 - protein, 115 aa, Artificial Sequence
  source: /note="Description of Artificial Sequence: Synthetic polypeptide"
  source: /note="Heavy Chain Combinations of Emibetuzumab IgG histidine scanning variant #30"
QVQLVQSGAEVKKPGASVKVSCKASGYTFTHYYMHWVRQAPGQGLEWMGRVNHNRRHTTYNQKFEGRVTMTTDTSTSTAYMELRSLRSDDTAVYYCARANWLDYWGQGTTVTVSS

SEQ ID NO: 247 - protein, 115 aa, Artificial Sequence
  source: /note="Description of Artificial Sequence: Synthetic polypeptide"
  source: /note="Heavy Chain Combinations of Emibetuzumab IgG histidine scanning variant #31"
QVQLVQSGAEVKKPGASVKVSCKASGYTFTHYYMHWVRQAPGQGLEWMGRVNHNRRGTTYNQKFEGRVTMTTDTSTSTAYMELRSLRSDDTAVYYCARAHWLDYWGQGTTVTVSS

SEQ ID NO: 248 - protein, 115 aa, Artificial Sequence
  source: /note="Description of Artificial Sequence: Synthetic polypeptide"
  source: /note="Heavy Chain Combinations of Emibetuzumab IgG histidine scanning variant #32"
QVQLVQSGAEVKKPGASVKVSCKASGYTFTDYYMHWVRQAPGQGLEWMGRVHHHRRGTTYNQKFEGRVTMTTDTSTSTAYMELRSLRSDDTAVYYCARANWLDYWGQGTTVTVSS

SEQ ID NO: 249 - protein, 115 aa, Artificial Sequence
  source: /note="Description of Artificial Sequence: Synthetic polypeptide"
  source: /note="Heavy Chain Combinations of Emibetuzumab IgG histidine scanning variant #33"
QVQLVQSGAEVKKPGASVKVSCKASGYTFTDYYMHWVRQAPGQGLEWMGRVHHNRRHTTYNQKFEGRVTMTTDTSTSTAYMELRSLRSDDTAVYYCARANWLDYWGQGTTVTVSS

SEQ ID NO: 250 - protein, 115 aa, Artificial Sequence
  source: /note="Description of Artificial Sequence: Synthetic polypeptide"
  source: /note="Heavy Chain Combinations of Emibetuzumab IgG histidine scanning variant #34"
QVQLVQSGAEVKKPGASVKVSCKASGYTFTDYYMHWVRQAPGQGLEWMGRVHHNRRGTTYNQKFEGRVTMTTDTSTSTAYMELRSLRSDDTAVYYCARAHWLDYWGQGTTVTVSS

SEQ ID NO: 251 - protein, 115 aa, Artificial Sequence
  source: /note="Description of Artificial Sequence: Synthetic polypeptide"
  source: /note="Heavy Chain Combinations of Emibetuzumab IgG histidine scanning variant #35"
QVQLVQSGAEVKKPGASVKVSCKASGYTFTDYYMHWVRQAPGQGLEWMGRVNHHRRHTTYNQKFEGRVTMTTDTSTSTAYMELRSLRSDDTAVYYCARANWLDYWGQGTTVTVSS

SEQ ID NO: 252 - protein, 115 aa, Artificial Sequence
  source: /note="Description of Artificial Sequence: Synthetic polypeptide"
  source: /note="Heavy Chain Combinations of Emibetuzumab IgG histidine scanning variant #36"
QVQLVQSGAEVKKPGASVKVSCKASGYTFTDYYMHWVRQAPGQGLEWMGRVNHHRRGTTYNQKFEGRVTMTTDTSTSTAYMELRSLRSDDTAVYYCARAHWLDYWGQGTTVTVSS

SEQ ID NO: 253 - protein, 115 aa, Artificial Sequence
  source: /note="Description of Artificial Sequence: Synthetic polypeptide"
  source: /note="Heavy Chain Combinations of Emibetuzumab IgG histidine scanning variant #37"
QVQLVQSGAEVKKPGASVKVSCKASGYTFTDYYMHWVRQAPGQGLEWMGRVNHNRRHTTYNQKFEGRVTMTTDTSTSTAYMELRSLRSDDTAVYYCARAHWLDYWGQGTTVTVSS

SEQ ID NO: 254 - protein, 115 aa, Artificial Sequence
  source: /note="Description of Artificial Sequence: Synthetic polypeptide"
  source: /note="Heavy Chain Combinations of Emibetuzumab IgG histidine scanning variant #38"
QVQLVQSGAEVKKPGASVKVSCKASGYTFTHYYMHWVRQAPGQGLEWMGRVHHHRRGTTYNQKFEGRVTMTTDTSTSTAYMELRSLRSDDTAVYYCARANWLDYWGQGTTVTVSS

SEQ ID NO: 255 - protein, 115 aa, Artificial Sequence
  source: /note="Description of Artificial Sequence: Synthetic polypeptide"
  source: /note="Heavy Chain Combinations of Emibetuzumab IgG histidine scanning variant #39"
QVQLVQSGAEVKKPGASVKVSCKASGYTFTHYYMHWVRQAPGQGLEWMGRVHHNRRHTTYNQKFEGRVTMTTDTSTSTAYMELRSLRSDDTAVYYCARANWLDYWGQGTTVTVSS

SEQ ID NO: 256 - protein, 115 aa, Artificial Sequence
  source: /note="Description of Artificial Sequence: Synthetic polypeptide"
  source: /note="Heavy Chain Combinations of Emibetuzumab IgG histidine scanning variant #40"
QVQLVQSGAEVKKPGASVKVSCKASGYTFTHYYMHWVRQAPGQGLEWMGRVHHNRRGTTYNQKFEGRVTMTTDTSTSTAYMELRSLRSDDTAVYYCARAHWLDYWGQGTTVTVSS

SEQ ID NO: 257 - protein, 115 aa, Artificial Sequence
  source: /note="Description of Artificial Sequence: Synthetic polypeptide"
  source: /note="Heavy Chain Combinations of Emibetuzumab IgG histidine scanning variant #41"
QVQLVQSGAEVKKPGASVKVSCKASGYTFTHYYMHWVRQAPGQGLEWMGRVNHHRRHTTYNQKFEGRVTMTTDTSTSTAYMELRSLRSDDTAVYYCARANWLDYWGQGTTVTVSS

SEQ ID NO: 258 - protein, 115 aa, Artificial Sequence
  source: /note="Description of Artificial Sequence: Synthetic polypeptide"
  source: /note="Heavy Chain Combinations of Emibetuzumab IgG histidine scanning variant #42"
QVQLVQSGAEVKKPGASVKVSCKASGYTFTHYYMHWVRQAPGQGLEWMGRVNHHRRGTTYNQKFEGRVTMTTDTSTSTAYMELRSLRSDDTAVYYCARAHWLDYWGQGTTVTVSS

SEQ ID NO: 259 - protein, 115 aa, Artificial Sequence
  source: /note="Description of Artificial Sequence: Synthetic polypeptide"
  source: /note="Heavy Chain Combinations of Emibetuzumab IgG histidine scanning variant #43"
QVQLVQSGAEVKKPGASVKVSCKASGYTFTHYYMHWVRQAPGQGLEWMGRVNHNRRHTTYNQKFEGRVTMTTDTSTSTAYMELRSLRSDDTAVYYCARAHWLDYWGQGTTVTVSS

SEQ ID NO: 260 - protein, 115 aa, Artificial Sequence
  source: /note="Description of Artificial Sequence: Synthetic polypeptide"
  source: /note="Heavy Chain Combinations of Emibetuzumab IgG histidine scanning variant #44"
QVQLVQSGAEVKKPGASVKVSCKASGYTFTDYYMHWVRQAPGQGLEWMGRVHHHRRHTTYNQKFEGRVTMTTDTSTSTAYMELRSLRSDDTAVYYCARANWLDYWGQGTTVTVSS

SEQ ID NO: 261 - protein, 115 aa, Artificial Sequence
  source: /note="Description of Artificial Sequence: Synthetic polypeptide"
  source: /note="Heavy Chain Combinations of Emibetuzumab IgG histidine scanning variant #45"
QVQLVQSGAEVKKPGASVKVSCKASGYTFTDYYMHWVRQAPGQGLEWMGRVHHHRRGTTYNQKFEGRVTMTTDTSTSTAYMELRSLRSDDTAVYYCARAHWLDYWGQGTTVTVSS

SEQ ID NO: 262 - protein, 115 aa, Artificial Sequence
  source: /note="Description of Artificial Sequence: Synthetic polypeptide"
  source: /note="Heavy Chain Combinations of Emibetuzumab IgG histidine scanning variant #46"
QVQLVQSGAEVKKPGASVKVSCKASGYTFTDYYMHWVRQAPGQGLEWMGRVHHNRRHTTYNQKFEGRVTMTTDTSTSTAYMELRSLRSDDTAVYYCARAHWLDYWGQGTTVTVSS

SEQ ID NO: 263 - protein, 115 aa, Artificial Sequence
  source: /note="Description of Artificial Sequence: Synthetic polypeptide"
  source: /note="Heavy Chain Combinations of Emibetuzumab IgG histidine scanning variant #47"
QVQLVQSGAEVKKPGASVKVSCKASGYTFTDYYMHWVRQAPGQGLEWMGRVNHHRRHTTYNQKFEGRVTMTTDTSTSTAYMELRSLRSDDTAVYYCARAHWLDYWGQGTTVTVSS

SEQ ID NO: 264 - protein, 115 aa, Artificial Sequence
  source: /note="Description of Artificial Sequence: Synthetic polypeptide"
  source: /note="Heavy Chain Combinations of Emibetuzumab IgG histidine scanning variant #48"
QVQLVQSGAEVKKPGASVKVSCKASGYTFTHYYMHWVRQAPGQGLEWMGRVHPNRRGTTYNQKFEGRVTMTTDTSTSTAYMELRSLRSDDTAVYYCARHNWLDYWGQGTTVTVSS

SEQ ID NO: 265 - protein, 115 aa, Artificial Sequence
  source: /note="Description of Artificial Sequence: Synthetic polypeptide"
  source: /note="Heavy Chain Combinations of Emibetuzumab IgG histidine scanning variant #49"
QVQLVQSGAEVKKPGASVKVSCKASGYTFTHYYMHWVRQAPGQGLEWMGRVNPHRRGTTYNQKFEGRVTMTTDTSTSTAYMELRSLRSDDTAVYYCARHNWLDYWGQGTTVTVSS

SEQ ID NO: 266 - protein, 115 aa, Artificial Sequence
  source: /note="Description of Artificial Sequence: Synthetic polypeptide"
  source: /note="Heavy Chain Combinations of Emibetuzumab IgG histidine scanning variant #50"
QVQLVQSGAEVKKPGASVKVSCKASGYTFTHYYMHWVRQAPGQGLEWMGRVNPNRRHTTYNQKFEGRVTMTTDTSTSTAYMELRSLRSDDTAVYYCARHNWLDYWGQGTTVTVSS

SEQ ID NO: 267 - protein, 115 aa, Artificial Sequence
  source: /note="Description of Artificial Sequence: Synthetic polypeptide"
  source: /note="Heavy Chain Combinations of Emibetuzumab IgG histidine scanning variant #51"
QVQLVQSGAEVKKPGASVKVSCKASGYTFTHYYMHWVRQAPGQGLEWMGRVNPNRRGTTYNQKFEGRVTMTTDTSTSTAYMELRSLRSDDTAVYYCARHHWLDYWGQGTTVTVSS

SEQ ID NO: 268 - protein, 115 aa, Artificial Sequence
  source: /note="Description of Artificial Sequence: Synthetic polypeptide"
  source: /note="Heavy Chain Combinations of Emibetuzumab IgG histidine scanning variant #52"
QVQLVQSGAEVKKPGASVKVSCKASGYTFTDYYMHWVRQAPGQGLEWMGRVHPHRRGTTYNQKFEGRVTMTTDTSTSTAYMELRSLRSDDTAVYYCARHNWLDYWGQGTTVTVSS

SEQ ID NO: 269 - protein, 115 aa, Artificial Sequence
  source: /note="Description of Artificial Sequence: Synthetic polypeptide"
  source: /note="Heavy Chain Combinations of Emibetuzumab IgG histidine scanning variant #53"
QVQLVQSGAEVKKPGASVKVSCKASGYTFTDYYMHWVRQAPGQGLEWMGRVHPNRRHTTYNQKFEGRVTMTTDTSTSTAYMELRSLRSDDTAVYYCARHNWLDYWGQGTTVTVSS

SEQ ID NO: 270 - protein, 115 aa, Artificial Sequence
  source: /note="Description of Artificial Sequence: Synthetic polypeptide"
  source: /note="Heavy Chain Combinations of Emibetuzumab IgG histidine scanning variant #54"
QVQLVQSGAEVKKPGASVKVSCKASGYTFTDYYMHWVRQAPGQGLEWMGRVHPNRRGTTYNQKFEGRVTMTTDTSTSTAYMELRSLRSDDTAVYYCARHHWLDYWGQGTTVTVSS

SEQ ID NO: 271 - protein, 115 aa, Artificial Sequence
  source: /note="Description of Artificial Sequence: Synthetic polypeptide"
  source: /note="Heavy Chain Combinations of Emibetuzumab IgG histidine scanning variant #55"
QVQLVQSGAEVKKPGASVKVSCKASGYTFTDYYMHWVRQAPGQGLEWMGRVNPHRRHTTYNQKFEGRVTMTTDTSTSTAYMELRSLRSDDTAVYYCARHNWLDYWGQGTTVTVSS

SEQ ID NO: 272 - protein, 115 aa, Artificial Sequence
  source: /note="Description of Artificial Sequence: Synthetic polypeptide"
  source: /note="Heavy Chain Combinations of Emibetuzumab IgG histidine scanning variant #56"
QVQLVQSGAEVKKPGASVKVSCKASGYTFTDYYMHWVRQAPGQGLEWMGRVNPHRRGTTYNQKFEGRVTMTTDTSTSTAYMELRSLRSDDTAVYYCARHHWLDYWGQGTTVTVSS

SEQ ID NO: 273 - protein, 115 aa, Artificial Sequence
  source: /note="Description of Artificial Sequence: Synthetic polypeptide"
  source: /note="Heavy Chain Combinations of Emibetuzumab IgG histidine scanning variant #57"
QVQLVQSGAEVKKPGASVKVSCKASGYTFTDYYMHWVRQAPGQGLEWMGRVNPNRRHTTYNQKFEGRVTMTTDTSTSTAYMELRSLRSDDTAVYYCARHHWLDYWGQGTTVTVSS

SEQ ID NO: 274 - protein, 115 aa, Artificial Sequence
  source: /note="Description of Artificial Sequence: Synthetic polypeptide"
  source: /note="Heavy Chain Combinations of Emibetuzumab IgG histidine scanning variant #58"
QVQLVQSGAEVKKPGASVKVSCKASGYTFTHYYMHWVRQAPGQGLEWMGRVHPHRRGTTYNQKFEGRVTMTTDTSTSTAYMELRSLRSDDTAVYYCARHNWLDYWGQGTTVTVSS

SEQ ID NO: 275 - protein, 115 aa, Artificial Sequence
  source: /note="Description of Artificial Sequence: Synthetic polypeptide"
  source: /note="Heavy Chain Combinations of Emibetuzumab IgG histidine scanning variant #59"
QVQLVQSGAEVKKPGASVKVSCKASGYTFTHYYMHWVRQAPGQGLEWMGRVHPNRRHTTYNQKFEGRVTMTTDTSTSTAYMELRSLRSDDTAVYYCARHNWLDYWGQGTTVTVSS

SEQ ID NO: 276 - protein, 115 aa, Artificial Sequence
  source: /note="Description of Artificial Sequence: Synthetic polypeptide"
  source: /note="Heavy Chain Combinations of Emibetuzumab IgG histidine scanning variant #60"
QVQLVQSGAEVKKPGASVKVSCKASGYTFTHYYMHWVRQAPGQGLEWMGRVHPNRRGTTYNQKFEGRVTMTTDTSTSTAYMELRSLRSDDTAVYYCARHHWLDYWGQGTTVTVSS

SEQ ID NO: 277 - protein, 115 aa, Artificial Sequence
  source: /note="Description of Artificial Sequence: Synthetic polypeptide"
  source: /note="Heavy Chain Combinations of Emibetuzumab IgG histidine scanning variant #61"
QVQLVQSGAEVKKPGASVKVSCKASGYTFTHYYMHWVRQAPGQGLEWMGRVNPHRRHTTYNQKFEGRVTMTTDTSTSTAYMELRSLRSDDTAVYYCARHNWLDYWGQGTTVTVSS

SEQ ID NO: 278 - protein, 115 aa, Artificial Sequence
  source: /note="Description of Artificial Sequence: Synthetic polypeptide"
  source: /note="Heavy Chain Combinations of Emibetuzumab IgG histidine scanning variant #62"
QVQLVQSGAEVKKPGASVKVSCKASGYTFTHYYMHWVRQAPGQGLEWMGRVNPHRRGTTYNQKFEGRVTMTTDTSTSTAYMELRSLRSDDTAVYYCARHHWLDYWGQGTTVTVSS

SEQ ID NO: 279 - protein, 115 aa, Artificial Sequence
  source: /note="Description of Artificial Sequence: Synthetic polypeptide"
  source: /note="Heavy Chain Combinations of Emibetuzumab IgG histidine scanning variant #63"
QVQLVQSGAEVKKPGASVKVSCKASGYTFTHYYMHWVRQAPGQGLEWMGRVNPNRRHTTYNQKFEGRVTMTTDTSTSTAYMELRSLRSDDTAVYYCARHHWLDYWGQGTTVTVSS

SEQ ID NO: 280 - protein, 115 aa, Artificial Sequence
  source: /note="Description of Artificial Sequence: Synthetic polypeptide"
  source: /note="Heavy Chain Combinations of Emibetuzumab IgG histidine scanning variant #64"
QVQLVQSGAEVKKPGASVKVSCKASGYTFTDYYMHWVRQAPGQGLEWMGRVHPHRRHTTYNQKFEGRVTMTTDTSTSTAYMELRSLRSDDTAVYYCARHNWLDYWGQGTTVTVSS

SEQ ID NO: 281 - protein, 115 aa, Artificial Sequence
  source: /note="Description of Artificial Sequence: Synthetic polypeptide"
  source: /note="Heavy Chain Combinations of Emibetuzumab IgG histidine scanning variant #65"
QVQLVQSGAEVKKPGASVKVSCKASGYTFTDYYMHWVRQAPGQGLEWMGRVHPHRRGTTYNQKFEGRVTMTTDTSTSTAYMELRSLRSDDTAVYYCARHHWLDYWGQGTTVTVSS

SEQ ID NO: 282 - protein, 115 aa, Artificial Sequence
  source: /note="Description of Artificial Sequence: Synthetic polypeptide"
  source: /note="Heavy Chain Combinations of Emibetuzumab IgG histidine scanning variant #66"
QVQLVQSGAEVKKPGASVKVSCKASGYTFTDYYMHWVRQAPGQGLEWMGRVHPNRRHTTYNQKFEGRVTMTTDTSTSTAYMELRSLRSDDTAVYYCARHHWLDYWGQGTTVTVSS

SEQ ID NO: 283 - protein, 115 aa, Artificial Sequence
  source: /note="Description of Artificial Sequence: Synthetic polypeptide"
  source: /note="Heavy Chain Combinations of Emibetuzumab IgG histidine scanning variant #67"
QVQLVQSGAEVKKPGASVKVSCKASGYTFTDYYMHWVRQAPGQGLEWMGRVNPHRRHTTYNQKFEGRVTMTTDTSTSTAYMELRSLRSDDTAVYYCARHHWLDYWGQGTTVTVSS

SEQ ID NO: 284 - protein, 108 aa, Artificial Sequence
  source: /note="Description of Artificial Sequence: Synthetic polypeptide"
  source: /note="Light Chain Combinations of Emibetuzumab IgG histidine scanning variant #1"
DIQMTQSPSSLSASVGDRVTITCSVSSSVSSIHLHWYQQKPGKAPKLLIYHTSNLASGVPSRFSGSGSGTDFTLTISSLQPEDFATYYCQVYSGYPLTFGGGTKVEIK

SEQ ID NO: 285 - protein, 108 aa, Artificial Sequence
  source: /note="Description of Artificial Sequence: Synthetic polypeptide"
  source: /note="Light Chain Combinations of Emibetuzumab IgG histidine scanning variant #2"
DIQMTQSPSSLSASVGDRVTITCSVSSSVSSIHLHWYQQKPGKAPKLLIYSTSNLASGVPSRFSGSGSGTDFTLTISSLQPEDFATYYCQHYSGYPLTFGGGTKVEIK

SEQ ID NO: 286 - protein, 108 aa, Artificial Sequence
  source: /note="Description of Artificial Sequence: Synthetic polypeptide"
  source: /note="Light Chain Combinations of Emibetuzumab IgG histidine scanning variant #3"
DIQMTQSPSSLSASVGDRVTITCSVSSSVSSIHLHWYQQKPGKAPKLLIYSTSNLASGVPSRFSGSGSGTDFTLTISSLQPEDFATYYCQVHSGYPLTFGGGTKVEIK

SEQ ID NO: 287 - protein, 108 aa, Artificial Sequence
  source: /note="Description of Artificial Sequence: Synthetic polypeptide"
  source: /note="Light Chain Combinations of Emibetuzumab IgG histidine scanning variant #4"
DIQMTQSPSSLSASVGDRVTITCSVSSSVSSIHLHWYQQKPGKAPKLLIYSTSNLASGVPSRFSGSGSGTDFTLTISSLQPEDFATYYCQVYSGHPLTFGGGTKVEIK

SEQ ID NO: 288 - protein, 108 aa, Artificial Sequence
  source: /note="Description of Artificial Sequence: Synthetic polypeptide"
  source: /note="Light Chain Combinations of Emibetuzumab IgG histidine scanning variant #5"
DIQMTQSPSSLSASVGDRVTITCSVSSSVSSIYLHWYQQKPGKAPKLLIYHTSNLASGVPSRFSGSGSGTDFTLTISSLQPEDFATYYCQHYSGYPLTFGGGTKVEIK

SEQ ID NO: 289 - protein, 108 aa, Artificial Sequence
  source: /note="Description of Artificial Sequence: Synthetic polypeptide"
  source: /note="Light Chain Combinations of Emibetuzumab IgG histidine scanning variant #6"
DIQMTQSPSSLSASVGDRVTITCSVSSSVSSIYLHWYQQKPGKAPKLLIYHTSNLASGVPSRFSGSGSGTDFTLTISSLQPEDFATYYCQVHSGYPLTFGGGTKVEIK

SEQ ID NO: 290 - protein, 108 aa, Artificial Sequence
  source: /note="Description of Artificial Sequence: Synthetic polypeptide"
  source: /note="Light Chain Combinations of Emibetuzumab IgG histidine scanning variant #7"
DIQMTQSPSSLSASVGDRVTITCSVSSSVSSIYLHWYQQKPGKAPKLLIYHTSNLASGVPSRFSGSGSGTDFTLTISSLQPEDFATYYCQVYSGHPLTFGGGTKVEIK

SEQ ID NO: 291 - protein, 108 aa, Artificial Sequence
  source: /note="Description of Artificial Sequence: Synthetic polypeptide"
  source: /note="Light Chain Combinations of Emibetuzumab IgG histidine scanning variant #8"
DIQMTQSPSSLSASVGDRVTITCSVSSSVSSIYLHWYQQKPGKAPKLLIYSTSNLASGVPSRFSGSGSGTDFTLTISSLQPEDFATYYCQHHSGYPLTFGGGTKVEIK

SEQ ID NO: 292 - protein, 108 aa, Artificial Sequence
  source: /note="Description of Artificial Sequence: Synthetic polypeptide"
  source: /note="Light Chain Combinations of Emibetuzumab IgG histidine scanning variant #9"
DIQMTQSPSSLSASVGDRVTITCSVSSSVSSIYLHWYQQKPGKAPKLLIYSTSNLASGVPSRFSGSGSGTDFTLTISSLQPEDFATYYCQHYSGHPLTFGGGTKVEIK

SEQ ID NO: 293 - protein, 108 aa, Artificial Sequence
  source: /note="Description of Artificial Sequence: Synthetic polypeptide"
  source: /note="Light Chain Combinations of Emibetuzumab IgG histidine scanning variant #10"
DIQMTQSPSSLSASVGDRVTITCSVSSSVSSIYLHWYQQKPGKAPKLLIYSTSNLASGVPSRFSGSGSGTDFTLTISSLQPEDFATYYCQVHSGHPLTFGGGTKVEIK

SEQ ID NO: 294 - protein, 108 aa, Artificial Sequence
  source: /note="Description of Artificial Sequence: Synthetic polypeptide"
  source: /note="Light Chain Combinations of Emibetuzumab IgG histidine scanning variant #11"
DIQMTQSPSSLSASVGDRVTITCSVSSSVSSIHLHWYQQKPGKAPKLLIYHTSNLASGVPSRFSGSGSGTDFTLTISSLQPEDFATYYCQHYSGYPLTFGGGTKVEIK

SEQ ID NO: 295 - protein, 108 aa, Artificial Sequence
  source: /note="Description of Artificial Sequence: Synthetic polypeptide"
  source: /note="Light Chain Combinations of Emibetuzumab IgG histidine scanning variant #12"
DIQMTQSPSSLSASVGDRVTITCSVSSSVSSIHLHWYQQKPGKAPKLLIYHTSNLASGVPSRFSGSGSGTDFTLTISSLQPEDFATYYCQVHSGYPLTFGGGTKVEIK

SEQ ID NO: 296 - protein, 108 aa, Artificial Sequence
  source: /note="Description of Artificial Sequence: Synthetic polypeptide"
  source: /note="Light Chain Combinations of Emibetuzumab IgG histidine scanning variant #13"
DIQMTQSPSSLSASVGDRVTITCSVSSSVSSIHLHWYQQKPGKAPKLLIYHTSNLASGVPSRFSGSGSGTDFTLTISSLQPEDFATYYCQVYSGHPLTFGGGTKVEIK

SEQ ID NO: 297 - protein, 108 aa, Artificial Sequence
  source: /note="Description of Artificial Sequence: Synthetic polypeptide"
  source: /note="Light Chain Combinations of Emibetuzumab IgG histidine scanning variant #14"
DIQMTQSPSSLSASVGDRVTITCSVSSSVSSIHLHWYQQKPGKAPKLLIYSTSNLASGVPSRFSGSGSGTDFTLTISSLQPEDFATYYCQHHSGYPLTFGGGTKVEIK

SEQ ID NO: 298 - protein, 108 aa, Artificial Sequence
  source: /note="Description of Artificial Sequence: Synthetic polypeptide"
  source: /note="Light Chain Combinations of Emibetuzumab IgG histidine scanning variant #15"
DIQMTQSPSSLSASVGDRVTITCSVSSSVSSIHLHWYQQKPGKAPKLLIYSTSNLASGVPSRFSGSGSGTDFTLTISSLQPEDFATYYCQHYSGHPLTFGGGTKVEIK

SEQ ID NO: 299 - protein, 108 aa, Artificial Sequence
  source: /note="Description of Artificial Sequence: Synthetic polypeptide"
  source: /note="Light Chain Combinations of Emibetuzumab IgG histidine scanning variant #16"
DIQMTQSPSSLSASVGDRVTITCSVSSSVSSIHLHWYQQKPGKAPKLLIYSTSNLASGVPSRFSGSGSGTDFTLTISSLQPEDFATYYCQVHSGHPLTFGGGTKVEIK

SEQ ID NO: 300 - protein, 108 aa, Artificial Sequence
  source: /note="Description of Artificial Sequence: Synthetic polypeptide"
  source: /note="Light Chain Combinations of Emibetuzumab IgG histidine scanning variant #17"
DIQMTQSPSSLSASVGDRVTITCSVSSSVSSIYLHWYQQKPGKAPKLLIYHTSNLASGVPSRFSGSGSGTDFTLTISSLQPEDFATYYCQHHSGYPLTFGGGTKVEIK

SEQ ID NO: 301 - protein, 108 aa, Artificial Sequence
  source: /note="Description of Artificial Sequence: Synthetic polypeptide"
  source: /note="Light Chain Combinations of Emibetuzumab IgG histidine scanning variant #18"
DIQMTQSPSSLSASVGDRVTITCSVSSSVSSIYLHWYQQKPGKAPKLLIYHTSNLASGVPSRFSGSGSGTDFTLTISSLQPEDFATYYCQHYSGHPLTFGGGTKVEIK

SEQ ID NO: 302 - protein, 108 aa, Artificial Sequence
  source: /note="Description of Artificial Sequence: Synthetic polypeptide"
  source: /note="Light Chain Combinations of Emibetuzumab IgG histidine scanning variant #19"
DIQMTQSPSSLSASVGDRVTITCSVSSSVSSIYLHWYQQKPGKAPKLLIYHTSNLASGVPSRFSGSGSGTDFTLTISSLQPEDFATYYCQVHSGHPLTFGGGTKVEIK

SEQ ID NO: 303 - protein, 108 aa, Artificial Sequence
  source: /note="Description of Artificial Sequence: Synthetic polypeptide"
  source: /note="Light Chain Combinations of Emibetuzumab IgG histidine scanning variant #20"
DIQMTQSPSSLSASVGDRVTITCSVSSSVSSIYLHWYQQKPGKAPKLLIYSTSNLASGVPSRFSGSGSGTDFTLTISSLQPEDFATYYCQHHSGHPLTFGGGTKVEIK

SEQ ID NO: 304 - protein, 118 aa, Artificial Sequence
  source: /note="Description of Artificial Sequence: Synthetic polypeptide"
  source: /note="Heavy Chain of hucMET27Gv1.3 IgG"
EVQLVESGGGLVQPGGSLRLSCAASGFTFSSYDMSWVRQAPGKGLEWVATINSNGVSIYYPDSVKGRFTISRDNAKNSLYLQMNSLRAEDTAVYYCAREEITTEMDYWGQGTLVTVSS

SEQ ID NO: 305 - protein, 111 aa, Artificial Sequence
  source: /note="Description of Artificial Sequence: Synthetic polypeptide"
  source: /note="Light Chain of hucMET27Gv1.3 IgG"
EIVLTQSPATLSLSPGERATLSCRASESVDSYGNSFIHWYQQKPGQAPRLLIYRASNLESGIPARFSGSGSGTDFTLTISSLEPEDFAVYYCQQSNEEPLTFGQGTKVELK

SEQ ID NO: 306 - protein, 10 aa, Artificial Sequence
  source: /note="Description of Artificial Sequence: Synthetic peptide"
  source: /note="Heavy Chain CDR1 of hucMET27Gv1.3"
GFTFSSYDMS

SEQ ID NO: 307 - protein, 17 aa, Artificial Sequence
  source: /note="Description of Artificial Sequence: Synthetic peptide"
  source: /note="Heavy Chain CDR2 of hucMET27Gv1.3"
TINSNGVSIYYPDSVKG

SEQ ID NO: 308 - protein, 11 aa, Artificial Sequence
  source: /note="Description of Artificial Sequence: Synthetic peptide"
  source: /note="Heavy Chain CDR3 of hucMET27Gv1.3"
AREEITTEMDY

SEQ ID NO: 309 - protein, 15 aa, Artificial Sequence
  source: /note="Description of Artificial Sequence: Synthetic peptide"
  source: /note="Light Chain CDR1 of hucMET27Gv1.3"
RASESVDSYGNSFIH

SEQ ID NO: 310 - protein, 7 aa, Artificial Sequence
  source: /note="Description of Artificial Sequence: Synthetic peptide"
  source: /note="Light Chain CDR2 of hucMET27Gv1.3"
RASNLES

SEQ ID NO: 311 - protein, 9 aa, Artificial Sequence
  source: /note="Description of Artificial Sequence: Synthetic peptide"
  source: /note="Light Chain CDR3 of hucMET27Gv1.3"
QQSNEEPLT

SEQ ID NO: 312 - protein, 118 aa, Artificial Sequence
  source: /note="Description of Artificial Sequence: Synthetic polypeptide"
  source: /note="Heavy Chain of hucMET27Gv1.3 IgG histidine scanning variant #1"
EVQLVESGGGLVQPGGSLRLSCAASHFTFSSYDMSWVRQAPGKGLEWVATINSNGVSIYYPDSVKGRFTISRDNAKNSLYLQMNSLRAEDTAVYYCAREEITTEMDYWGQGTLVTVSS

SEQ ID NO: 313 - protein, 118 aa, Artificial Sequence
  source: /note="Description of Artificial Sequence: Synthetic polypeptide"
  source: /note="Heavy Chain of hucMET27Gv1.3 IgG histidine scanning variant #2"
EVQLVESGGGLVQPGGSLRLSCAASGHTFSSYDMSWVRQAPGKGLEWVATINSNGVSIYYPDSVKGRFTISRDNAKNSLYLQMNSLRAEDTAVYYCAREEITTEMDYWGQGTLVTVSS

SEQ ID NO: 314 - protein, 118 aa, Artificial Sequence
  source: /note="Description of Artificial Sequence: Synthetic polypeptide"
  source: /note="Heavy Chain of hucMET27Gv1.3 IgG histidine scanning variant #3"
EVQLVESGGGLVQPGGSLRLSCAASGFHFSSYDMSWVRQAPGKGLEWVATINSNGVSIYYPDSVKGRFTISRDNAKNSLYLQMNSLRAEDTAVYYCAREEITTEMDYWGQGTLVTVSS

SEQ ID NO: 315 - protein, 118 aa, Artificial Sequence
  source: /note="Description of Artificial Sequence: Synthetic polypeptide"
  source: /note="Heavy Chain of hucMET27Gv1.3 IgG histidine scanning variant #4"
EVQLVESGGGLVQPGGSLRLSCAASGFTHSSYDMSWVRQAPGKGLEWVATINSNGVSIYYPDSVKGRFTISRDNAKNSLYLQMNSLRAEDTAVYYCAREEITTEMDYWGQGTLVTVSS

SEQ ID NO: 316 - protein, 118 aa, Artificial Sequence
  source: /note="Description of Artificial Sequence: Synthetic polypeptide"
  source: /note="Heavy Chain of hucMET27Gv1.3 IgG histidine scanning variant #5"
EVQLVESGGGLVQPGGSLRLSCAASGFTFHSYDMSWVRQAPGKGLEWVATINSNGVSIYYPDSVKGRFTISRDNAKNSLYLQMNSLRAEDTAVYYCAREEITTEMDYWGQGTLVTVSS

SEQ ID NO: 317 - protein, 118 aa, Artificial Sequence
  source: /note="Description of Artificial Sequence: Synthetic polypeptide"
  source: /note="Heavy Chain of hucMET27Gv1.3 IgG histidine scanning variant #6"
EVQLVESGGGLVQPGGSLRLSCAASGFTFSHYDMSWVRQAPGKGLEWVATINSNGVSIYYPDSVKGRFTISRDNAKNSLYLQMNSLRAEDTAVYYCAREEITTEMDYWGQGTLVTVSS

SEQ ID NO: 318 - protein, 118 aa, Artificial Sequence
  source: /note="Description of Artificial Sequence: Synthetic polypeptide"
  source: /note="Heavy Chain of hucMET27Gv1.3 IgG histidine scanning variant #7"
EVQLVESGGGLVQPGGSLRLSCAASGFTFSSHDMSWVRQAPGKGLEWVATINSNGVSIYYPDSVKGRFTISRDNAKNSLYLQMNSLRAEDTAVYYCAREEITTEMDYWGQGTLVTVSS

SEQ ID NO: 319 - protein, 118 aa, Artificial Sequence
  source: /note="Description of Artificial Sequence: Synthetic polypeptide"
  source: /note="Heavy Chain of hucMET27Gv1.3 IgG histidine scanning variant #8"
EVQLVESGGGLVQPGGSLRLSCAASGFTFSSYHMSWVRQAPGKGLEWVATINSNGVSIYYPDSVKGRFTISRDNAKNSLYLQMNSLRAEDTAVYYCAREEITTEMDYWGQGTLVTVSS

SEQ ID NO: 320 - protein, 118 aa, Artificial Sequence
  source: /note="Description of Artificial Sequence: Synthetic polypeptide"
  source: /note="Heavy Chain of hucMET27Gv1.3 IgG histidine scanning variant #9"
EVQLVESGGGLVQPGGSLRLSCAASGFTFSSYDHSWVRQAPGKGLEWVATINSNGVSIYYPDSVKGRFTISRDNAKNSLYLQMNSLRAEDTAVYYCAREEITTEMDYWGQGTLVTVSS

SEQ ID NO: 321 - protein, 118 aa, Artificial Sequence
  source: /note="Description of Artificial Sequence: Synthetic polypeptide"
  source: /note="Heavy Chain of hucMET27Gv1.3 IgG histidine scanning variant #10"
EVQLVESGGGLVQPGGSLRLSCAASGFTFSSYDMHWVRQAPGKGLEWVATINSNGVSIYYPDSVKGRFTISRDNAKNSLYLQMNSLRAEDTAVYYCAREEITTEMDYWGQGTLVTVSS

SEQ ID NO: 322 - protein, 118 aa, Artificial Sequence
  source: /note="Description of Artificial Sequence: Synthetic polypeptide"
  source: /note="Heavy Chain of hucMET27Gv1.3 IgG histidine scanning variant #11"
EVQLVESGGGLVQPGGSLRLSCAASGFTFSSYDMSWVRQAPGKGLEWVAHINSNGVSIYYPDSVKGRFTISRDNAKNSLYLQMNSLRAEDTAVYYCAREEITTEMDYWGQGTLVTVSS

SEQ ID NO: 323 - protein, 118 aa, Artificial Sequence
  source: /note="Description of Artificial Sequence: Synthetic polypeptide"
  source: /note="Heavy Chain of hucMET27Gv1.3 IgG histidine scanning variant #12"
EVQLVESGGGLVQPGGSLRLSCAASGFTFSSYDMSWVRQAPGKGLEWVATHNSNGVSIYYPDSVKGRFTISRDNAKNSLYLQMNSLRAEDTAVYYCAREEITTEMDYWGQGTLVTVSS

SEQ ID NO: 324 - protein, 118 aa, Artificial Sequence
  source: /note="Description of Artificial Sequence: Synthetic polypeptide"
  source: /note="Heavy Chain of hucMET27Gv1.3 IgG histidine scanning variant #13"
EVQLVESGGGLVQPGGSLRLSCAASGFTFSSYDMSWVRQAPGKGLEWVATIHSNGVSIYYPDSVKGRFTISRDNAKNSLYLQMNSLRAEDTAVYYCAREEITTEMDYWGQGTLVTVSS

SEQ ID NO: 325 - protein, 118 aa, Artificial Sequence
  source: /note="Description of Artificial Sequence: Synthetic polypeptide"
  source: /note="Heavy Chain of hucMET27Gv1.3 IgG histidine scanning variant #14"
EVQLVESGGGLVQPGGSLRLSCAASGFTFSSYDMSWVRQAPGKGLEWVATINHNGVSIYYPDSVKGRFTISRDNAKNSLYLQMNSLRAEDTAVYYCAREEITTEMDYWGQGTLVTVSS

SEQ ID NO: 326 - protein, 118 aa, Artificial Sequence
  source: /note="Description of Artificial Sequence: Synthetic polypeptide"
  source: /note="Heavy Chain of hucMET27Gv1.3 IgG histidine scanning variant #15"
EVQLVESGGGLVQPGGSLRLSCAASGFTFSSYDMSWVRQAPGKGLEWVATINSHGVSIYYPDSVKGRFTISRDNAKNSLYLQMNSLRAEDTAVYYCAREEITTEMDYWGQGTLVTVSS

SEQ ID NO: 327 - protein, 118 aa, Artificial Sequence
  source: /note="Description of Artificial Sequence: Synthetic polypeptide"
  source: /note="Heavy Chain of hucMET27Gv1.3 IgG histidine scanning variant #16"
EVQLVESGGGLVQPGGSLRLSCAASGFTFSSYDMSWVRQAPGKGLEWVATINSNHVSIYYPDSVKGRFTISRDNAKNSLYLQMNSLRAEDTAVYYCAREEITTEMDYWGQGTLVTVSS

SEQ ID NO: 328 - protein, 118 aa, Artificial Sequence
  source: /note="Description of Artificial Sequence: Synthetic polypeptide"
  source: /note="Heavy Chain of hucMET27Gv1.3 IgG histidine scanning variant #17"
EVQLVESGGGLVQPGGSLRLSCAASGFTFSSYDMSWVRQAPGKGLEWVATINSNGHSIYYPDSVKGRFTISRDNAKNSLYLQMNSLRAEDTAVYYCAREEITTEMDYWGQGTLVTVSS

SEQ ID NO: 329 - protein, 118 aa, Artificial Sequence
  source: /note="Description of Artificial Sequence: Synthetic polypeptide"
  source: /note="Heavy Chain of hucMET27Gv1.3 IgG histidine scanning variant #18"
EVQLVESGGGLVQPGGSLRLSCAASGFTFSSYDMSWVRQAPGKGLEWVATINSNGVHIYYPDSVKGRFTISRDNAKNSLYLQMNSLRAEDTAVYYCAREEITTEMDYWGQGTLVTVSS

SEQ ID NO: 330 - protein, 118 aa, Artificial Sequence
  source: /note="Description of Artificial Sequence: Synthetic polypeptide"
  source: /note="Heavy Chain of hucMET27Gv1.3 IgG histidine scanning variant #19"
EVQLVESGGGLVQPGGSLRLSCAASGFTFSSYDMSWVRQAPGKGLEWVATINSNGVSHYYPDSVKGRFTISRDNAKNSLYLQMNSLRAEDTAVYYCAREEITTEMDYWGQGTLVTVSS

SEQ ID NO: 331 - protein, 118 aa, Artificial Sequence
  source: /note="Description of Artificial Sequence: Synthetic polypeptide"
  source: /note="Heavy Chain of hucMET27Gv1.3 IgG histidine scanning variant #20"
EVQLVESGGGLVQPGGSLRLSCAASGFTFSSYDMSWVRQAPGKGLEWVATINSNGVSIHYPDSVKGRFTISRDNAKNSLYLQMNSLRAEDTAVYYCAREEITTEMDYWGQGTLVTVSS

SEQ ID NO: 332 - protein, 118 aa, Artificial Sequence
  source: /note="Description of Artificial Sequence: Synthetic polypeptide"
  source: /note="Heavy Chain of hucMET27Gv1.3 IgG histidine scanning variant #21"
EVQLVESGGGLVQPGGSLRLSCAASGFTFSSYDMSWVRQAPGKGLEWVATINSNGVSIYHPDSVKGRFTISRDNAKNSLYLQMNSLRAEDTAVYYCAREEITTEMDYWGQGTLVTVSS

SEQ ID NO: 333 - protein, 118 aa, Artificial Sequence
  source: /note="Description of Artificial Sequence: Synthetic polypeptide"
  source: /note="Heavy Chain of hucMET27Gv1.3 IgG histidine scanning variant #22"
EVQLVESGGGLVQPGGSLRLSCAASGFTFSSYDMSWVRQAPGKGLEWVATINSNGVSIYYHDSVKGRFTISRDNAKNSLYLQMNSLRAEDTAVYYCAREEITTEMDYWGQGTLVTVSS

SEQ ID NO: 334 - protein, 118 aa, Artificial Sequence
  source: /note="Description of Artificial Sequence: Synthetic polypeptide"
  source: /note="Heavy Chain of hucMET27Gv1.3 IgG histidine scanning variant #23"
EVQLVESGGGLVQPGGSLRLSCAASGFTFSSYDMSWVRQAPGKGLEWVATINSNGVSIYYPHSVKGRFTISRDNAKNSLYLQMNSLRAEDTAVYYCAREEITTEMDYWGQGTLVTVSS

SEQ ID NO: 335 - protein, 118 aa, Artificial Sequence
  source: /note="Description of Artificial Sequence: Synthetic polypeptide"
  source: /note="Heavy Chain of hucMET27Gv1.3 IgG histidine scanning variant #24"
EVQLVESGGGLVQPGGSLRLSCAASGFTFSSYDMSWVRQAPGKGLEWVATINSNGVSIYYPDHVKGRFTISRDNAKNSLYLQMNSLRAEDTAVYYCAREEITTEMDYWGQGTLVTVSS

SEQ ID NO: 336 - protein, 118 aa, Artificial Sequence
  source: /note="Description of Artificial Sequence: Synthetic polypeptide"
  source: /note="Heavy Chain of hucMET27Gv1.3 IgG histidine scanning variant #25"
EVQLVESGGGLVQPGGSLRLSCAASGFTFSSYDMSWVRQAPGKGLEWVATINSNGVSIYYPDSHKGRFTISRDNAKNSLYLQMNSLRAEDTAVYYCAREEITTEMDYWGQGTLVTVSS

SEQ ID NO: 337 - protein, 118 aa, Artificial Sequence
  source: /note="Description of Artificial Sequence: Synthetic polypeptide"
  source: /note="Heavy Chain of hucMET27Gv1.3 IgG histidine scanning variant #26"
EVQLVESGGGLVQPGGSLRLSCAASGFTFSSYDMSWVRQAPGKGLEWVATINSNGVSIYYPDSVHGRFTISRDNAKNSLYLQMNSLRAEDTAVYYCAREEITTEMDYWGQGTLVTVSS

SEQ ID NO: 338 - protein, 118 aa, Artificial Sequence
  source: /note="Description of Artificial Sequence: Synthetic polypeptide"
  source: /note="Heavy Chain of hucMET27Gv1.3 IgG histidine scanning variant #27"
EVQLVESGGGLVQPGGSLRLSCAASGFTFSSYDMSWVRQAPGKGLEWVATINSNGVSIYYPDSVKHRFTISRDNAKNSLYLQMNSLRAEDTAVYYCAREEITTEMDYWGQGTLVTVSS

SEQ ID NO: 339 - protein, 118 aa, Artificial Sequence
  source: /note="Description of Artificial Sequence: Synthetic polypeptide"
  source: /note="Heavy Chain of hucMET27Gv1.3 IgG histidine scanning variant #28"
EVQLVESGGGLVQPGGSLRLSCAASGFTFSSYDMSWVRQAPGKGLEWVATINSNGVSIYYPDSVKGRFTISRDNAKNSLYLQMNSLRAEDTAVYYCHREEITTEMDYWGQGTLVTVSS

SEQ ID NO: 340 - protein, 118 aa, Artificial Sequence
  source: /note="Description of Artificial Sequence: Synthetic polypeptide"
  source: /note="Heavy Chain of hucMET27Gv1.3 IgG histidine scanning variant #29"
EVQLVESGGGLVQPGGSLRLSCAASGFTFSSYDMSWVRQAPGKGLEWVATINSNGVSIYYPDSVKGRFTISRDNAKNSLYLQMNSLRAEDTAVYYCAHEEITTEMDYWGQGTLVTVSS

SEQ ID NO: 341 - protein, 118 aa, Artificial Sequence
  source: /note="Description of Artificial Sequence: Synthetic polypeptide"
  source: /note="Heavy Chain of hucMET27Gv1.3 IgG histidine scanning variant #30"
EVQLVESGGGLVQPGGSLRLSCAASGFTFSSYDMSWVRQAPGKGLEWVATINSNGVSIYYPDSVKGRFTISRDNAKNSLYLQMNSLRAEDTAVYYCARHEITTEMDYWGQGTLVTVSS

SEQ ID NO: 342 - protein, 118 aa, Artificial Sequence
  source: /note="Description of Artificial Sequence: Synthetic polypeptide"
  source: /note="Heavy Chain of hucMET27Gv1.3 IgG histidine scanning variant #31"
EVQLVESGGGLVQPGGSLRLSCAASGFTFSSYDMSWVRQAPGKGLEWVATINSNGVSIYYPDSVKGRFTISRDNAKNSLYLQMNSLRAEDTAVYYCAREHITTEMDYWGQGTLVTVSS

SEQ ID NO: 343 - protein, 118 aa, Artificial Sequence
  source: /note="Description of Artificial Sequence: Synthetic polypeptide"
  source: /note="Heavy Chain of hucMET27Gv1.3 IgG histidine scanning variant #32"
EVQLVESGGGLVQPGGSLRLSCAASGFTFSSYDMSWVRQAPGKGLEWVATINSNGVSIYYPDSVKGRFTISRDNAKNSLYLQMNSLRAEDTAVYYCAREEHTTEMDYWGQGTLVTVSS

SEQ ID NO: 344 - protein, 118 aa, Artificial Sequence
  source: /note="Description of Artificial Sequence: Synthetic polypeptide"
  source: /note="Heavy Chain of hucMET27Gv1.3 IgG histidine scanning variant #33"
EVQLVESGGGLVQPGGSLRLSCAASGFTFSSYDMSWVRQAPGKGLEWVATINSNGVSIYYPDSVKGRFTISRDNAKNSLYLQMNSLRAEDTAVYYCAREEIHTEMDYWGQGTLVTVSS

SEQ ID NO: 345 - protein, 118 aa, Artificial Sequence
  source: /note="Description of Artificial Sequence: Synthetic polypeptide"
  source: /note="Heavy Chain of hucMET27Gv1.3 IgG histidine scanning variant #34"
EVQLVESGGGLVQPGGSLRLSCAASGFTFSSYDMSWVRQAPGKGLEWVATINSNGVSIYYPDSVKGRFTISRDNAKNSLYLQMNSLRAEDTAVYYCAREEITHEMDYWGQGTLVTVSS

SEQ ID NO: 346 - protein, 118 aa, Artificial Sequence
  source: /note="Description of Artificial Sequence: Synthetic polypeptide"
  source: /note="Heavy Chain of hucMET27Gv1.3 IgG histidine scanning variant #35"
EVQLVESGGGLVQPGGSLRLSCAASGFTFSSYDMSWVRQAPGKGLEWVATINSNGVSIYYPDSVKGRFTISRDNAKNSLYLQMNSLRAEDTAVYYCAREEITTHMDYWGQGTLVTVSS

SEQ ID NO: 347 - protein, 118 aa, Artificial Sequence
  source: /note="Description of Artificial Sequence: Synthetic polypeptide"
  source: /note="Heavy Chain of hucMET27Gv1.3 IgG histidine scanning variant #36"
EVQLVESGGGLVQPGGSLRLSCAASGFTFSSYDMSWVRQAPGKGLEWVATINSNGVSIYYPDSVKGRFTISRDNAKNSLYLQMNSLRAEDTAVYYCAREEITTEHDYWGQGTLVTVSS

SEQ ID NO: 348 - protein, 118 aa, Artificial Sequence
  source: /note="Description of Artificial Sequence: Synthetic polypeptide"
  source: /note="Heavy Chain of hucMET27Gv1.3 IgG histidine scanning variant #37"
EVQLVESGGGLVQPGGSLRLSCAASGFTFSSYDMSWVRQAPGKGLEWVATINSNGVSIYYPDSVKGRFTISRDNAKNSLYLQMNSLRAEDTAVYYCAREEITTEMHYWGQGTLVTVSS

SEQ ID NO: 349 - protein, 118 aa, Artificial Sequence
  source: /note="Description of Artificial Sequence: Synthetic polypeptide"
  source: /note="Heavy Chain of hucMET27Gv1.3 IgG histidine scanning variant #38"
EVQLVESGGGLVQPGGSLRLSCAASGFTFSSYDMSWVRQAPGKGLEWVATINSNGVSIYYPDSVKGRFTISRDNAKNSLYLQMNSLRAEDTAVYYCAREEITTEMDHWGQGTLVTVSS

SEQ ID NO: 350 - protein, 111 aa, Artificial Sequence
  source: /note="Description of Artificial Sequence: Synthetic polypeptide"
  source: /note="Light Chain of hucMET27Gv1.3 IgG histidine scanning variant #1"
EIVLTQSPATLSLSPGERATLSCHASESVDSYGNSFIHWYQQKPGQAPRLLIYRASNLESGIPARFSGSGSGTDFTLTISSLEPEDFAVYYCQQSNEEPLTFGQGTKVELK

SEQ ID NO: 351 - protein, 111 aa, Artificial Sequence
  source: /note="Description of Artificial Sequence: Synthetic polypeptide"
  source: /note="Light Chain of hucMET27Gv1.3 IgG histidine scanning variant #2"
EIVLTQSPATLSLSPGERATLSCRHSESVDSYGNSFIHWYQQKPGQAPRLLIYRASNLESGIPARFSGSGSGTDFTLTISSLEPEDFAVYYCQQSNEEPLTFGQGTKVELK

SEQ ID NO: 352 - protein, 111 aa, Artificial Sequence
  source: /note="Description of Artificial Sequence: Synthetic polypeptide"
  source: /note="Light Chain of hucMET27Gv1.3 IgG histidine scanning variant #3"
EIVLTQSPATLSLSPGERATLSCRAHESVDSYGNSFIHWYQQKPGQAPRLLIYRASNLESGIPARFSGSGSGTDFTLTISSLEPEDFAVYYCQQSNEEPLTFGQGTKVELK

SEQ ID NO: 353 - protein, 111 aa, Artificial Sequence
  source: /note="Description of Artificial Sequence: Synthetic polypeptide"
  source: /note="Light Chain of hucMET27Gv1.3 IgG histidine scanning variant #4"
EIVLTQSPATLSLSPGERATLSCRASHSVDSYGNSFIHWYQQKPGQAPRLLIYRASNLESGIPARFSGSGSGTDFTLTISSLEPEDFAVYYCQQSNEEPLTFGQGTKVELK

SEQ ID NO: 354 - protein, 111 aa, Artificial Sequence
  source: /note="Description of Artificial Sequence: Synthetic polypeptide"
  source: /note="Light Chain of hucMET27Gv1.3 IgG histidine scanning variant #5"
EIVLTQSPATLSLSPGERATLSCRASEHVDSYGNSFIHWYQQKPGQAPRLLIYRASNLESGIPARFSGSGSGTDFTLTISSLEPEDFAVYYCQQSNEEPLTFGQGTKVELK

SEQ ID NO: 355 - protein, 111 aa, Artificial Sequence
  source: /note="Description of Artificial Sequence: Synthetic polypeptide"
  source: /note="Light Chain of hucMET27Gv1.3 IgG histidine scanning variant #6"
EIVLTQSPATLSLSPGERATLSCRASESHDSYGNSFIHWYQQKPGQAPRLLIYRASNLESGIPARFSGSGSGTDFTLTISSLEPEDFAVYYCQQSNEEPLTFGQGTKVELK

SEQ ID NO: 356 - protein, 111 aa, Artificial Sequence
  source: /note="Description of Artificial Sequence: Synthetic polypeptide"
  source: /note="Light Chain of hucMET27Gv1.3 IgG histidine scanning variant #7"
EIVLTQSPATLSLSPGERATLSCRASESVHSYGNSFIHWYQQKPGQAPRLLIYRASNLESGIPARFSGSGSGTDFTLTISSLEPEDFAVYYCQQSNEEPLTFGQGTKVELK

SEQ ID NO: 357 - protein, 111 aa, Artificial Sequence
  source: /note="Description of Artificial Sequence: Synthetic polypeptide"
  source: /note="Light Chain of hucMET27Gv1.3 IgG histidine scanning variant #8"
EIVLTQSPATLSLSPGERATLSCRASESVDHYGNSFIHWYQQKPGQAPRLLIYRASNLESGIPARFSGSGSGTDFTLTISSLEPEDFAVYYCQQSNEEPLTFGQGTKVELK

SEQ ID NO: 358 - protein, 111 aa, Artificial Sequence
  source: /note="Description of Artificial Sequence: Synthetic polypeptide"
  source: /note="Light Chain of hucMET27Gv1.3 IgG histidine scanning variant #9"
EIVLTQSPATLSLSPGERATLSCRASESVDSHGNSFIHWYQQKPGQAPRLLIYRASNLESGIPARFSGSGSGTDFTLTISSLEPEDFAVYYCQQSNEEPLTFGQGTKVELK

SEQ ID NO: 359 - protein, 111 aa, Artificial Sequence
  source: /note="Description of Artificial Sequence: Synthetic polypeptide"
  source: /note="Light Chain of hucMET27Gv1.3 IgG histidine scanning variant #10"
EIVLTQSPATLSLSPGERATLSCRASESVDSYHNSFIHWYQQKPGQAPRLLIYRASNLESGIPARFSGSGSGTDFTLTISSLEPEDFAVYYCQQSNEEPLTFGQGTKVELK

SEQ ID NO: 360 - protein, 111 aa, Artificial Sequence
  source: /note="Description of Artificial Sequence: Synthetic polypeptide"
  source: /note="Light Chain of hucMET27Gv1.3 IgG histidine scanning variant #11"
EIVLTQSPATLSLSPGERATLSCRASESVDSYGHSFIHWYQQKPGQAPRLLIYRASNLESGIPARFSGSGSGTDFTLTISSLEPEDFAVYYCQQSNEEPLTFGQGTKVELK

SEQ ID NO: 361 - protein, 111 aa, Artificial Sequence
  source: /note="Description of Artificial Sequence: Synthetic polypeptide"
  source: /note="Light Chain of hucMET27Gv1.3 IgG histidine scanning variant #12"
EIVLTQSPATLSLSPGERATLSCRASESVDSYGNHFIHWYQQKPGQAPRLLIYRASNLESGIPARFSGSGSGTDFTLTISSLEPEDFAVYYCQQSNEEPLTFGQGTKVELK

SEQ ID NO: 362 - protein, 111 aa, Artificial Sequence
  source: /note="Description of Artificial Sequence: Synthetic polypeptide"
  source: /note="Light Chain of hucMET27Gv1.3 IgG histidine scanning variant #13"
EIVLTQSPATLSLSPGERATLSCRASESVDSYGNSHIHWYQQKPGQAPRLLIYRASNLESGIPARFSGSGSGTDFTLTISSLEPEDFAVYYCQQSNEEPLTFGQGTKVELK

SEQ ID NO: 363 - protein, 111 aa, Artificial Sequence
  source: /note="Description of Artificial Sequence: Synthetic polypeptide"
  source: /note="Light Chain of hucMET27Gv1.3 IgG histidine scanning variant #14"
EIVLTQSPATLSLSPGERATLSCRASESVDSYGNSFHHWYQQKPGQAPRLLIYRASNLESGIPARFSGSGSGTDFTLTISSLEPEDFAVYYCQQSNEEPLTFGQGTKVELK

SEQ ID NO: 364 - protein, 111 aa, Artificial Sequence
  source: /note="Description of Artificial Sequence: Synthetic polypeptide"
  source: /note="Light Chain of hucMET27Gv1.3 IgG histidine scanning variant #15"
EIVLTQSPATLSLSPGERATLSCRASESVDSYGNSFIAWYQQKPGQAPRLLIYRASNLESGIPARFSGSGSGTDFTLTISSLEPEDFAVYYCQQSNEEPLTFGQGTKVELK

SEQ ID NO: 365 - protein, 111 aa, Artificial Sequence
  source: /note="Description of Artificial Sequence: Synthetic polypeptide"
  source: /note="Light Chain of hucMET27Gv1.3 IgG histidine scanning variant #16"
EIVLTQSPATLSLSPGERATLSCRASESVDSYGNSFIHWYQQKPGQAPRLLIYHASNLESGIPARFSGSGSGTDFTLTISSLEPEDFAVYYCQQSNEEPLTFGQGTKVELK

SEQ ID NO: 366 - protein, 111 aa, Artificial Sequence
  source: /note="Description of Artificial Sequence: Synthetic polypeptide"
  source: /note="Light Chain of hucMET27Gv1.3 IgG histidine scanning variant #17"
EIVLTQSPATLSLSPGERATLSCRASESVDSYGNSFIHWYQQKPGQAPRLLIYRHSNLESGIPARFSGSGSGTDFTLTISSLEPEDFAVYYCQQSNEEPLTFGQGTKVELK

SEQ ID NO: 367 - protein, 111 aa, Artificial Sequence
  source: /note="Description of Artificial Sequence: Synthetic polypeptide"
  source: /note="Light Chain of hucMET27Gv1.3 IgG histidine scanning variant #18"
EIVLTQSPATLSLSPGERATLSCRASESVDSYGNSFIHWYQQKPGQAPRLLIYRAHNLESGIPARFSGSGSGTDFTLTISSLEPEDFAVYYCQQSNEEPLTFGQGTKVELK

SEQ ID NO: 368 - protein, 111 aa, Artificial Sequence
  source: /note="Description of Artificial Sequence: Synthetic polypeptide"
  source: /note="Light Chain of hucMET27Gv1.3 IgG histidine scanning variant #19"
EIVLTQSPATLSLSPGERATLSCRASESVDSYGNSFIHWYQQKPGQAPRLLIYRASHLESGIPARFSGSGSGTDFTLTISSLEPEDFAVYYCQQSNEEPLTFGQGTKVELK

SEQ ID NO: 369 - protein, 111 aa, Artificial Sequence
  source: /note="Description of Artificial Sequence: Synthetic polypeptide"
  source: /note="Light Chain of hucMET27Gv1.3 IgG histidine scanning variant #20"
EIVLTQSPATLSLSPGERATLSCRASESVDSYGNSFIHWYQQKPGQAPRLLIYRASNHESGIPARFSGSGSGTDFTLTISSLEPEDFAVYYCQQSNEEPLTFGQGTKVELK

SEQ ID NO: 370 - protein, 111 aa, Artificial Sequence
  source: /note="Description of Artificial Sequence: Synthetic polypeptide"
  source: /note="Light Chain of hucMET27Gv1.3 IgG histidine scanning variant #21"
EIVLTQSPATLSLSPGERATLSCRASESVDSYGNSFIHWYQQKPGQAPRLLIYRASNLHSGIPARFSGSGSGTDFTLTISSLEPEDFAVYYCQQSNEEPLTFGQGTKVELK

SEQ ID NO: 371 - protein, 111 aa, Artificial Sequence
  source: /note="Description of Artificial Sequence: Synthetic polypeptide"
  source: /note="Light Chain of hucMET27Gv1.3 IgG histidine scanning variant #22"
EIVLTQSPATLSLSPGERATLSCRASESVDSYGNSFIHWYQQKPGQAPRLLIYRASNLEHGIPARFSGSGSGTDFTLTISSLEPEDFAVYYCQQSNEEPLTFGQGTKVELK

SEQ ID NO: 372 - protein, 111 aa, Artificial Sequence
  source: /note="Description of Artificial Sequence: Synthetic polypeptide"
  source: /note="Light Chain of hucMET27Gv1.3 IgG histidine scanning variant #23"
EIVLTQSPATLSLSPGERATLSCRASESVDSYGNSFIHWYQQKPGQAPRLLIYRASNLESGIPARFSGSGSGTDFTLTISSLEPEDFAVYYCHQSNEEPLTFGQGTKVELK

SEQ ID NO: 373 - protein, 111 aa, Artificial Sequence
  source: /note="Description of Artificial Sequence: Synthetic polypeptide"
  source: /note="Light Chain of hucMET27Gv1.3 IgG histidine scanning variant #24"
EIVLTQSPATLSLSPGERATLSCRASESVDSYGNSFIHWYQQKPGQAPRLLIYRASNLESGIPARFSGSGSGTDFTLTISSLEPEDFAVYYCQHSNEEPLTFGQGTKVELK

SEQ ID NO: 374 - protein, 111 aa, Artificial Sequence
  source: /note="Description of Artificial Sequence: Synthetic polypeptide"
  source: /note="Light Chain of hucMET27Gv1.3 IgG histidine scanning variant #25"
EIVLTQSPATLSLSPGERATLSCRASESVDSYGNSFIHWYQQKPGQAPRLLIYRASNLESGIPARFSGSGSGTDFTLTISSLEPEDFAVYYCQQHNEEPLTFGQGTKVELK

SEQ ID NO: 375 - protein, 111 aa, Artificial Sequence
  source: /note="Description of Artificial Sequence: Synthetic polypeptide"
  source: /note="Light Chain of hucMET27Gv1.3 IgG histidine scanning variant #26"
EIVLTQSPATLSLSPGERATLSCRASESVDSYGNSFIHWYQQKPGQAPRLLIYRASNLESGIPARFSGSGSGTDFTLTISSLEPEDFAVYYCQQSHEEPLTFGQGTKVELK

SEQ ID NO: 376 - protein, 111 aa, Artificial Sequence
  source: /note="Description of Artificial Sequence: Synthetic polypeptide"
  source: /note="Light Chain of hucMET27Gv1.3 IgG histidine scanning variant #27"
EIVLTQSPATLSLSPGERATLSCRASESVDSYGNSFIHWYQQKPGQAPRLLIYRASNLESGIPARFSGSGSGTDFTLTISSLEPEDFAVYYCQQSNHEPLTFGQGTKVELK

SEQ ID NO: 377 - protein, 111 aa, Artificial Sequence
  source: /note="Description of Artificial Sequence: Synthetic polypeptide"
  source: /note="Light Chain of hucMET27Gv1.3 IgG histidine scanning variant #28"
EIVLTQSPATLSLSPGERATLSCRASESVDSYGNSFIHWYQQKPGQAPRLLIYRASNLESGIPARFSGSGSGTDFTLTISSLEPEDFAVYYCQQSNEHPLTFGQGTKVELK

SEQ ID NO: 378 - protein, 111 aa, Artificial Sequence
  source: /note="Description of Artificial Sequence: Synthetic polypeptide"
  source: /note="Light Chain of hucMET27Gv1.3 IgG histidine scanning variant #29"
EIVLTQSPATLSLSPGERATLSCRASESVDSYGNSFIHWYQQKPGQAPRLLIYRASNLESGIPARFSGSGSGTDFTLTISSLEPEDFAVYYCQQSNEEHLTFGQGTKVELK

SEQ ID NO: 379 - protein, 111 aa, Artificial Sequence
  source: /note="Description of Artificial Sequence: Synthetic polypeptide"
  source: /note="Light Chain of hucMET27Gv1.3 IgG histidine scanning variant #30"
EIVLTQSPATLSLSPGERATLSCRASESVDSYGNSFIHWYQQKPGQAPRLLIYRASNLESGIPARFSGSGSGTDFTLTISSLEPEDFAVYYCQQSNEEPHTFGQGTKVELK

SEQ ID NO: 380 - protein, 111 aa, Artificial Sequence
  source: /note="Description of Artificial Sequence: Synthetic polypeptide"
  source: /note="Light Chain of hucMET27Gv1.3 IgG histidine scanning variant #31"
EIVLTQSPATLSLSPGERATLSCRASESVDSYGNSFIHWYQQKPGQAPRLLIYRASNLESGIPARFSGSGSGTDFTLTISSLEPEDFAVYYCQQSNEEPLHFGQGTKVELK

SEQ ID NO: 381 - protein, 118 aa, Artificial Sequence
  source: /note="Description of Artificial Sequence: Synthetic polypeptide"
  source: /note="Heavy Chain Combinations of hucMET27Gv1.3 IgG histidine scanning variant #1"
EVQLVESGGGLVQPGGSLRLSCAASGHTFSSYDMSWVRQAPGKGLEWVATINSNGVSIYHPDSVKGRFTISRDNAKNSLYLQMNSLRAEDTAVYYCAREEITTEMDYWGQGTLVTVSS

SEQ ID NO: 382 - protein, 118 aa, Artificial Sequence
  source: /note="Description of Artificial Sequence: Synthetic polypeptide"
  source: /note="Heavy Chain Combinations of hucMET27Gv1.3 IgG histidine scanning variant #2"
EVQLVESGGGLVQPGGSLRLSCAASGHTFSSYDMSWVRQAPGKGLEWVATINSNGVSIYYPDSVKHRFTISRDNAKNSLYLQMNSLRAEDTAVYYCAREEITTEMDYWGQGTLVTVSS

SEQ ID NO: 383 - protein, 118 aa, Artificial Sequence
  source: /note="Description of Artificial Sequence: Synthetic polypeptide"
  source: /note="Heavy Chain Combinations of hucMET27Gv1.3 IgG histidine scanning variant #3"
EVQLVESGGGLVQPGGSLRLSCAASGHTFSSYDMSWVRQAPGKGLEWVATINSNGVSIYYPDSVKGRFTISRDNAKNSLYLQMNSLRAEDTAVYYCAREEITTEHDYWGQGTLVTVSS

SEQ ID NO: 384 - protein, 118 aa, Artificial Sequence
  source: /note="Description of Artificial Sequence: Synthetic polypeptide"
  source: /note="Heavy Chain Combinations of hucMET27Gv1.3 IgG histidine scanning variant #4"
EVQLVESGGGLVQPGGSLRLSCAASGHTFSSYDMSWVRQAPGKGLEWVATINSNGVSIYYPDSVKGRFTISRDNAKNSLYLQMNSLRAEDTAVYYCAREEITTEMDHWGQGTLVTVSS

SEQ ID NO: 385 - protein, 118 aa, Artificial Sequence
  source: /note="Description of Artificial Sequence: Synthetic polypeptide"
  source: /note="Heavy Chain Combinations of hucMET27Gv1.3 IgG histidine scanning variant #5"
EVQLVESGGGLVQPGGSLRLSCAASGFTFSSYDMSWVRQAPGKGLEWVATINSNGVSIYHPDSVKHRFTISRDNAKNSLYLQMNSLRAEDTAVYYCAREEITTEMDYWGQGTLVTVSS

SEQ ID NO: 386 - protein, 118 aa, Artificial Sequence
  source: /note="Description of Artificial Sequence: Synthetic polypeptide"
  source: /note="Heavy Chain Combinations of hucMET27Gv1.3 IgG histidine scanning variant #6"
EVQLVESGGGLVQPGGSLRLSCAASGFTFSSYDMSWVRQAPGKGLEWVATINSNGVSIYHPDSVKGRFTISRDNAKNSLYLQMNSLRAEDTAVYYCAREEITTEHDYWGQGTLVTVSS

SEQ ID NO: 387 - protein, 118 aa, Artificial Sequence
  source: /note="Description of Artificial Sequence: Synthetic polypeptide"
  source: /note="Heavy Chain Combinations of hucMET27Gv1.3 IgG histidine scanning variant #7"
EVQLVESGGGLVQPGGSLRLSCAASGFTFSSYDMSWVRQAPGKGLEWVATINSNGVSIYHPDSVKGRFTISRDNAKNSLYLQMNSLRAEDTAVYYCAREEITTEMDHWGQGTLVTVSS

SEQ ID NO: 388 - protein, 118 aa, Artificial Sequence
  source: /note="Description of Artificial Sequence: Synthetic polypeptide"
  source: /note="Heavy Chain Combinations of hucMET27Gv1.3 IgG histidine scanning variant #8"
EVQLVESGGGLVQPGGSLRLSCAASGFTFSSYDMSWVRQAPGKGLEWVATINSNGVSIYYPDSVKHRFTISRDNAKNSLYLQMNSLRAEDTAVYYCAREEITTEHDYWGQGTLVTVSS

SEQ ID NO: 389 - protein, 118 aa, Artificial Sequence
  source: /note="Description of Artificial Sequence: Synthetic polypeptide"
  source: /note="Heavy Chain Combinations of hucMET27Gv1.3 IgG histidine scanning variant #9"
EVQLVESGGGLVQPGGSLRLSCAASGFTFSSYDMSWVRQAPGKGLEWVATINSNGVSIYYPDSVKHRFTISRDNAKNSLYLQMNSLRAEDTAVYYCAREEITTEMDHWGQGTLVTVSS

SEQ ID NO: 390 - protein, 118 aa, Artificial Sequence
  source: /note="Description of Artificial Sequence: Synthetic polypeptide"
  source: /note="Heavy Chain Combinations of hucMET27Gv1.3 IgG histidine scanning variant #10"
EVQLVESGGGLVQPGGSLRLSCAASGFTFSSYDMSWVRQAPGKGLEWVATINSNGVSIYYPDSVKGRFTISRDNAKNSLYLQMNSLRAEDTAVYYCAREEITTEHDHWGQGTLVTVSS

SEQ ID NO: 391 - protein, 118 aa, Artificial Sequence
  source: /note="Description of Artificial Sequence: Synthetic polypeptide"
  source: /note="Heavy Chain Combinations of hucMET27Gv1.3 IgG histidine scanning variant #11"
EVQLVESGGGLVQPGGSLRLSCAASGHTFSSYDMSWVRQAPGKGLEWVATINSNGVSIYHPDSVKHRFTISRDNAKNSLYLQMNSLRAEDTAVYYCAREEITTEMDYWGQGTLVTVSS

SEQ ID NO: 392 - protein, 118 aa, Artificial Sequence
  source: /note="Description of Artificial Sequence: Synthetic polypeptide"
  source: /note="Heavy Chain Combinations of hucMET27Gv1.3 IgG histidine scanning variant #12"
EVQLVESGGGLVQPGGSLRLSCAASGHTFSSYDMSWVRQAPGKGLEWVATINSNGVSIYHPDSVKGRFTISRDNAKNSLYLQMNSLRAEDTAVYYCAREEITTEHDYWGQGTLVTVSS

SEQ ID NO: 393 - protein, 118 aa, Artificial Sequence
  source: /note="Description of Artificial Sequence: Synthetic polypeptide"
  source: /note="Heavy Chain Combinations of hucMET27Gv1.3 IgG histidine scanning variant #13"
EVQLVESGGGLVQPGGSLRLSCAASGHTFSSYDMSWVRQAPGKGLEWVATINSNGVSIYHPDSVKGRFTISRDNAKNSLYLQMNSLRAEDTAVYYCAREEITTEMDHWGQGTLVTVSS

SEQ ID NO: 394 - protein, 118 aa, Artificial Sequence
  source: /note="Description of Artificial Sequence: Synthetic polypeptide"
  source: /note="Heavy Chain Combinations of hucMET27Gv1.3 IgG histidine scanning variant #14"
EVQLVESGGGLVQPGGSLRLSCAASGHTFSSYDMSWVRQAPGKGLEWVATINSNGVSIYYPDSVKHRFTISRDNAKNSLYLQMNSLRAEDTAVYYCAREEITTEHDYWGQGTLVTVSS

SEQ ID NO: 395 - protein, 118 aa, Artificial Sequence
  source: /note="Description of Artificial Sequence: Synthetic polypeptide"
  source: /note="Heavy Chain Combinations of hucMET27Gv1.3 IgG histidine scanning variant #15"
EVQLVESGGGLVQPGGSLRLSCAASGHTFSSYDMSWVRQAPGKGLEWVATINSNGVSIYYPDSVKHRFTISRDNAKNSLYLQMNSLRAEDTAVYYCAREEITTEMDHWGQGTLVTVSS

SEQ ID NO: 396 - protein, 118 aa, Artificial Sequence
  source: /note="Description of Artificial Sequence: Synthetic polypeptide"
  source: /note="Heavy Chain Combinations of hucMET27Gv1.3 IgG histidine scanning variant #16"
EVQLVESGGGLVQPGGSLRLSCAASGHTFSSYDMSWVRQAPGKGLEWVATINSNGVSIYYPDSVKGRFTISRDNAKNSLYLQMNSLRAEDTAVYYCAREEITTEHDHWGQGTLVTVSS

SEQ ID NO: 397 - protein, 118 aa, Artificial Sequence
  source: /note="Description of Artificial Sequence: Synthetic polypeptide"
  source: /note="Heavy Chain Combinations of hucMET27Gv1.3 IgG histidine scanning variant #17"
EVQLVESGGGLVQPGGSLRLSCAASGFTFSSYDMSWVRQAPGKGLEWVATINSNGVSIYHPDSVKHRFTISRDNAKNSLYLQMNSLRAEDTAVYYCAREEITTEHDYWGQGTLVTVSS

SEQ ID NO: 398 - protein, 118 aa, Artificial Sequence
  source: /note="Description of Artificial Sequence: Synthetic polypeptide"
  source: /note="Heavy Chain Combinations of hucMET27Gv1.3 IgG histidine scanning variant #18"
EVQLVESGGGLVQPGGSLRLSCAASGFTFSSYDMSWVRQAPGKGLEWVATINSNGVSIYHPDSVKHRFTISRDNAKNSLYLQMNSLRAEDTAVYYCAREEITTEMDHWGQGTLVTVSS

SEQ ID NO: 399 - protein, 118 aa, Artificial Sequence
  source: /note="Description of Artificial Sequence: Synthetic polypeptide"
  source: /note="Heavy Chain Combinations of hucMET27Gv1.3 IgG histidine scanning variant #19"
EVQLVESGGGLVQPGGSLRLSCAASGFTFSSYDMSWVRQAPGKGLEWVATINSNGVSIYHPDSVKGRFTISRDNAKNSLYLQMNSLRAEDTAVYYCAREEITTEHDHWGQGTLVTVSS

SEQ ID NO: 400 - protein, 118 aa, Artificial Sequence
  source: /note="Description of Artificial Sequence: Synthetic polypeptide"
  source: /note="Heavy Chain Combinations of hucMET27Gv1.3 IgG histidine scanning variant #20"
EVQLVESGGGLVQPGGSLRLSCAASGFTFSSYDMSWVRQAPGKGLEWVATINSNGVSIYYPDSVKHRFTISRDNAKNSLYLQMNSLRAEDTAVYYCAREEITTEHDHWGQGTLVTVSS

SEQ ID NO: 401 - protein, 118 aa, Artificial Sequence
  source: /note="Description of Artificial Sequence: Synthetic polypeptide"
  source: /note="Heavy Chain Combinations of hucMET27Gv1.3 IgG histidine scanning variant #21"
EVQLVESGGGLVQPGGSLRLSCAASGHTFSSYDMSWVRQAPGKGLEWVATINSNGVSIYYPDSVKGRFTISRDNAKNSLYLQMNSLRAEDTAVYYCAREEITHEMDYWGQGTLVTVSS

SEQ ID NO: 402 - protein, 118 aa, Artificial Sequence
  source: /note="Description of Artificial Sequence: Synthetic polypeptide"
  source: /note="Heavy Chain Combinations of hucMET27Gv1.3 IgG histidine scanning variant #22"
EVQLVESGGGLVQPGGSLRLSCAASGFTFSSYDMSWVRQAPGKGLEWVATINSNGVSIYYPDSVKGRFTISRDNAKNSLYLQMNSLRAEDTAVYYCAREEITHEHDYWGQGTLVTVSS

SEQ ID NO: 403 - protein, 118 aa, Artificial Sequence
  source: /note="Description of Artificial Sequence: Synthetic polypeptide"
  source: /note="Heavy Chain Combinations of hucMET27Gv1.3 IgG histidine scanning variant #23"
EVQLVESGGGLVQPGGSLRLSCAASGFTFSSYDMSWVRQAPGKGLEWVATINSNGVSIYYPDSVKGRFTISRDNAKNSLYLQMNSLRAEDTAVYYCAREEITHEMDHWGQGTLVTVSS

SEQ ID NO: 404 - protein, 118 aa, Artificial Sequence
  source: /note="Description of Artificial Sequence: Synthetic polypeptide"
  source: /note="Heavy Chain Combinations of hucMET27Gv1.3 IgG histidine scanning variant #24"
EVQLVESGGGLVQPGGSLRLSCAASGFTFSSYDMSWVRQAPGKGLEWVATINSNGVSIYHPDSVKGRFTISRDNAKNSLYLQMNSLRAEDTAVYYCAREEITHEMDYWGQGTLVTVSS

SEQ ID NO: 405 - protein, 118 aa, Artificial Sequence; identical to SEQ ID NO: 345
  source: /note="Description of Artificial Sequence: Synthetic polypeptide"
  source: /note="Heavy Chain Combinations of hucMET27Gv1.3 IgG histidine scanning variant #25"

SEQ ID NO: 406 - protein, 118 aa, Artificial Sequence
  source: /note="Description of Artificial Sequence: Synthetic polypeptide"
  source: /note="Heavy Chain Combinations of hucMET27Gv1.3 IgG histidine scanning variant #26"
EVQLVESGGGLVQPGGSLRLSCAASGHTFSSYDMSWVRQAPGKGLEWVATINSNGVSIYHPDSVKGRFTISRDNAKNSLYLQMNSLRAEDTAVYYCAREEITHEMDYWGQGTLVTVSS

SEQ ID NO: 407 - protein, 118 aa, Artificial Sequence
  source: /note="Description of Artificial Sequence: Synthetic polypeptide"
  source: /note="Heavy Chain Combinations of hucMET27Gv1.3 IgG histidine scanning variant #27"
EVQLVESGGGLVQPGGSLRLSCAASGHTFSSYDMSWVRQAPGKGLEWVATINSNGVSIYYPDSVKHRFTISRDNAKNSLYLQMNSLRAEDTAVYYCAREEITHEMDYWGQGTLVTVSS

SEQ ID NO: 408 - protein, 118 aa, Artificial Sequence
  source: /note="Description of Artificial Sequence: Synthetic polypeptide"
  source: /note="Heavy Chain Combinations of hucMET27Gv1.3 IgG histidine scanning variant #28"
EVQLVESGGGLVQPGGSLRLSCAASGHTFSSYDMSWVRQAPGKGLEWVATINSNGVSIYYPDSVKGRFTISRDNAKNSLYLQMNSLRAEDTAVYYCAREEITHEHDYWGQGTLVTVSS

SEQ ID NO: 409 - protein, 118 aa, Artificial Sequence
  source: /note="Description of Artificial Sequence: Synthetic polypeptide"
  source: /note="Heavy Chain Combinations of hucMET27Gv1.3 IgG histidine scanning variant #29"
EVQLVESGGGLVQPGGSLRLSCAASGHTFSSYDMSWVRQAPGKGLEWVATINSNGVSIYYPDSVKGRFTISRDNAKNSLYLQMNSLRAEDTAVYYCAREEITHEMDHWGQGTLVTVSS

SEQ ID NO: 410 - protein, 118 aa, Artificial Sequence
  source: /note="Description of Artificial Sequence: Synthetic polypeptide"
  source: /note="Heavy Chain Combinations of hucMET27Gv1.3 IgG histidine scanning variant #30"
EVQLVESGGGLVQPGGSLRLSCAASGFTFSSYDMSWVRQAPGKGLEWVATINSNGVSIYHPDSVKHRFTISRDNAKNSLYLQMNSLRAEDTAVYYCAREEITHEMDYWGQGTLVTVSS

SEQ ID NO: 411 - protein, 118 aa, Artificial Sequence
  source: /note="Description of Artificial Sequence: Synthetic polypeptide"
  source: /note="Heavy Chain Combinations of hucMET27Gv1.3 IgG histidine scanning variant #31"
EVQLVESGGGLVQPGGSLRLSCAASGFTFSSYDMSWVRQAPGKGLEWVATINSNGVSIYHPDSVKGRFTISRDNAKNSLYLQMNSLRAEDTAVYYCAREEITHEHDYWGQGTLVTVSS

SEQ ID NO: 412 - protein, 118 aa, Artificial Sequence
  source: /note="Description of Artificial Sequence: Synthetic polypeptide"
  source: /note="Heavy Chain Combinations of hucMET27Gv1.3 IgG histidine scanning variant #32"
EVQLVESGGGLVQPGGSLRLSCAASGFTFSSYDMSWVRQAPGKGLEWVATINSNGVSIYHPDSVKGRFTISRDNAKNSLYLQMNSLRAEDTAVYYCAREEITHEMDHWGQGTLVTVSS

SEQ ID NO: 413 - protein, 118 aa, Artificial Sequence
  source: /note="Description of Artificial Sequence: Synthetic polypeptide"
  source: /note="Heavy Chain Combinations of hucMET27Gv1.3 IgG histidine scanning variant #33"
EVQLVESGGGLVQPGGSLRLSCAASGFTFSSYDMSWVRQAPGKGLEWVATINSNGVSIYYPDSVKHRFTISRDNAKNSLYLQMNSLRAEDTAVYYCAREEITHEHDYWGQGTLVTVSS

SEQ ID NO: 414 - protein, 118 aa, Artificial Sequence
  source: /note="Description of Artificial Sequence: Synthetic polypeptide"
  source: /note="Heavy Chain Combinations of hucMET27Gv1.3 IgG histidine scanning variant #34"
EVQLVESGGGLVQPGGSLRLSCAASGFTFSSYDMSWVRQAPGKGLEWVATINSNGVSIYYPDSVKHRFTISRDNAKNSLYLQMNSLRAEDTAVYYCAREEITHEMDHWGQGTLVTVSS

SEQ ID NO: 415 - protein, 118 aa, Artificial Sequence
  source: /note="Description of Artificial Sequence: Synthetic polypeptide"
  source: /note="Heavy Chain Combinations of hucMET27Gv1.3 IgG histidine scanning variant #35"
EVQLVESGGGLVQPGGSLRLSCAASGFTFSSYDMSWVRQAPGKGLEWVATINSNGVSIYYPDSVKGRFTISRDNAKNSLYLQMNSLRAEDTAVYYCAREEITHEHDHWGQGTLVTVSS

SEQ ID NO: 416 - protein, 118 aa, Artificial Sequence
  source: /note="Description of Artificial Sequence: Synthetic polypeptide"
  source: /note="Heavy Chain Combinations of hucMET27Gv1.3 IgG histidine scanning variant #36"
EVQLVESGGGLVQPGGSLRLSCAASGHTFSSYDMSWVRQAPGKGLEWVATINSNGVSIYHPDSVKHRFTISRDNAKNSLYLQMNSLRAEDTAVYYCAREEITHEMDYWGQGTLVTVSS

SEQ ID NO: 417 - protein, 118 aa, Artificial Sequence
  source: /note="Description of Artificial Sequence: Synthetic polypeptide"
  source: /note="Heavy Chain Combinations of hucMET27Gv1.3 IgG histidine scanning variant #37"
EVQLVESGGGLVQPGGSLRLSCAASGHTFSSYDMSWVRQAPGKGLEWVATINSNGVSIYHPDSVKGRFTISRDNAKNSLYLQMNSLRAEDTAVYYCAREEITHEHDYWGQGTLVTVSS

SEQ ID NO: 418 - protein, 118 aa, Artificial Sequence
  source: /note="Description of Artificial Sequence: Synthetic polypeptide"
  source: /note="Heavy Chain Combinations of hucMET27Gv1.3 IgG histidine scanning variant #38"
EVQLVESGGGLVQPGGSLRLSCAASGHTFSSYDMSWVRQAPGKGLEWVATINSNGVSIYHPDSVKGRFTISRDNAKNSLYLQMNSLRAEDTAVYYCAREEITHEMDHWGQGTLVTVSS

SEQ ID NO: 419 - protein, 118 aa, Artificial Sequence
  source: /note="Description of Artificial Sequence: Synthetic polypeptide"
  source: /note="Heavy Chain Combinations of hucMET27Gv1.3 IgG histidine scanning variant #39"
EVQLVESGGGLVQPGGSLRLSCAASGHTFSSYDMSWVRQAPGKGLEWVATINSNGVSIYYPDSVKHRFTISRDNAKNSLYLQMNSLRAEDTAVYYCAREEITHEHDYWGQGTLVTVSS

SEQ ID NO: 420 - protein, 118 aa, Artificial Sequence
  source: /note="Description of Artificial Sequence: Synthetic polypeptide"
  source: /note="Heavy Chain Combinations of hucMET27Gv1.3 IgG histidine scanning variant #40"
EVQLVESGGGLVQPGGSLRLSCAASGHTFSSYDMSWVRQAPGKGLEWVATINSNGVSIYYPDSVKHRFTISRDNAKNSLYLQMNSLRAEDTAVYYCAREEITHEMDHWGQGTLVTVSS

SEQ ID NO: 421 - protein, 118 aa, Artificial Sequence
  source: /note="Description of Artificial Sequence: Synthetic polypeptide"
  source: /note="Heavy Chain Combinations of hucMET27Gv1.3 IgG histidine scanning variant #41"
EVQLVESGGGLVQPGGSLRLSCAASGHTFSSYDMSWVRQAPGKGLEWVATINSNGVSIYYPDSVKGRFTISRDNAKNSLYLQMNSLRAEDTAVYYCAREEITHEHDHWGQGTLVTVSS

SEQ ID NO: 422 - protein, 118 aa, Artificial Sequence
  source: /note="Description of Artificial Sequence: Synthetic polypeptide"
  source: /note="Heavy Chain Combinations of hucMET27Gv1.3 IgG histidine scanning variant #42"
EVQLVESGGGLVQPGGSLRLSCAASGFTFSSYDMSWVRQAPGKGLEWVATINSNGVSIYHPDSVKHRFTISRDNAKNSLYLQMNSLRAEDTAVYYCAREEITHEHDYWGQGTLVTVSS

SEQ ID NO: 423 - protein, 118 aa, Artificial Sequence
  source: /note="Description of Artificial Sequence: Synthetic polypeptide"
  source: /note="Heavy Chain Combinations of hucMET27Gv1.3 IgG histidine scanning variant #43"
EVQLVESGGGLVQPGGSLRLSCAASGFTFSSYDMSWVRQAPGKGLEWVATINSNGVSIYHPDSVKHRFTISRDNAKNSLYLQMNSLRAEDTAVYYCAREEITHEMDHWGQGTLVTVSS

SEQ ID NO: 424 - protein, 118 aa, Artificial Sequence
  source: /note="Description of Artificial Sequence: Synthetic polypeptide"
  source: /note="Heavy Chain Combinations of hucMET27Gv1.3 IgG histidine scanning variant #44"
EVQLVESGGGLVQPGGSLRLSCAASGFTFSSYDMSWVRQAPGKGLEWVATINSNGVSIYHPDSVKGRFTISRDNAKNSLYLQMNSLRAEDTAVYYCAREEITHEHDHWGQGTLVTVSS

SEQ ID NO: 425 - protein, 118 aa, Artificial Sequence
  source: /note="Description of Artificial Sequence: Synthetic polypeptide"
  source: /note="Heavy Chain Combinations of hucMET27Gv1.3 IgG histidine scanning variant #45"
EVQLVESGGGLVQPGGSLRLSCAASGFTFSSYDMSWVRQAPGKGLEWVATINSNGVSIYYPDSVKHRFTISRDNAKNSLYLQMNSLRAEDTAVYYCAREEITHEHDHWGQGTLVTVSS

SEQ ID NO: 426 - protein, 111 aa, Artificial Sequence
  source: /note="Description of Artificial Sequence: Synthetic polypeptide"
  source: /note="Light Chain Combinations of hucMET27Gv1.3 IgG histidine scanning variant #1"
EIVLTQSPATLSLSPGERATLSCRASESHDSYGHSFIHWYQQKPGQAPRLLIYRASNLESGIPARFSGSGSGTDFTLTISSLEPEDFAVYYCQQSNEEPLTFGQGTKVELK

SEQ ID NO: 427 - protein, 111 aa, Artificial Sequence
  source: /note="Description of Artificial Sequence: Synthetic polypeptide"
  source: /note="Light Chain Combinations of hucMET27Gv1.3 IgG histidine scanning variant #2"
EIVLTQSPATLSLSPGERATLSCRASESHDSYGNSHIHWYQQKPGQAPRLLIYRASNLESGIPARFSGSGSGTDFTLTISSLEPEDFAVYYCQQSNEEPLTFGQGTKVELK

SEQ ID NO: 428 - protein, 111 aa, Artificial Sequence
  source: /note="Description of Artificial Sequence: Synthetic polypeptide"
  source: /note="Light Chain Combinations of hucMET27Gv1.3 IgG histidine scanning variant #3"
EIVLTQSPATLSLSPGERATLSCRASESHDSYGNSFIHWYQQKPGQAPRLLIYRASNLEHGIPARFSGSGSGTDFTLTISSLEPEDFAVYYCQQSNEEPLTFGQGTKVELK

SEQ ID NO: 429 - protein, 111 aa, Artificial Sequence
  source: /note="Description of Artificial Sequence: Synthetic polypeptide"
  source: /note="Light Chain Combinations of hucMET27Gv1.3 IgG histidine scanning variant #4"
EIVLTQSPATLSLSPGERATLSCRASESHDSYGNSFIHWYQQKPGQAPRLLIYRASNLESGIPARFSGSGSGTDFTLTISSLEPEDFAVYYCQQSNEEHLTFGQGTKVELK

SEQ ID NO: 430 - protein, 111 aa, Artificial Sequence
  source: /note="Description of Artificial Sequence: Synthetic polypeptide"
  source: /note="Light Chain Combinations of hucMET27Gv1.3 IgG histidine scanning variant #5"
EIVLTQSPATLSLSPGERATLSCRASESVDSYGHSHIHWYQQKPGQAPRLLIYRASNLESGIPARFSGSGSGTDFTLTISSLEPEDFAVYYCQQSNEEPLTFGQGTKVELK

SEQ ID NO: 431 - protein, 111 aa, Artificial Sequence
  source: /note="Description of Artificial Sequence: Synthetic polypeptide"
  source: /note="Light Chain Combinations of hucMET27Gv1.3 IgG histidine scanning variant #6"
EIVLTQSPATLSLSPGERATLSCRASESVDSYGHSFIHWYQQKPGQAPRLLIYRASNLEHGIPARFSGSGSGTDFTLTISSLEPEDFAVYYCQQSNEEPLTFGQGTKVELK

SEQ ID NO: 432 - protein, 111 aa, Artificial Sequence
  source: /note="Description of Artificial Sequence: Synthetic polypeptide"
  source: /note="Light Chain Combinations of hucMET27Gv1.3 IgG histidine scanning variant #7"
EIVLTQSPATLSLSPGERATLSCRASESVDSYGHSFIHWYQQKPGQAPRLLIYRASNLESGIPARFSGSGSGTDFTLTISSLEPEDFAVYYCQQSNEEHLTFGQGTKVELK

SEQ ID NO: 433 - protein, 111 aa, Artificial Sequence
  source: /note="Description of Artificial Sequence: Synthetic polypeptide"
  source: /note="Light Chain Combinations of hucMET27Gv1.3 IgG histidine scanning variant #8"
EIVLTQSPATLSLSPGERATLSCRASESVDSYGNSHIHWYQQKPGQAPRLLIYRASNLEHGIPARFSGSGSGTDFTLTISSLEPEDFAVYYCQQSNEEPLTFGQGTKVELK

SEQ ID NO: 434 - protein, 111 aa, Artificial Sequence
  source: /note="Description of Artificial Sequence: Synthetic polypeptide"
  source: /note="Light Chain Combinations of hucMET27Gv1.3 IgG histidine scanning variant #9"
EIVLTQSPATLSLSPGERATLSCRASESVDSYGNSHIHWYQQKPGQAPRLLIYRASNLESGIPARFSGSGSGTDFTLTISSLEPEDFAVYYCQQSNEEHLTFGQGTKVELK

SEQ ID NO: 435 - protein, 111 aa, Artificial Sequence
  source: /note="Description of Artificial Sequence: Synthetic polypeptide"
  source: /note="Light Chain Combinations of hucMET27Gv1.3 IgG histidine scanning variant #10"
EIVLTQSPATLSLSPGERATLSCRASESVDSYGNSFIHWYQQKPGQAPRLLIYRASNLEHGIPARFSGSGSGTDFTLTISSLEPEDFAVYYCQQSNEEHLTFGQGTKVELK

SEQ ID NO: 436 - protein, 111 aa, Artificial Sequence
  source: /note="Description of Artificial Sequence: Synthetic polypeptide"
  source: /note="Light Chain Combinations of hucMET27Gv1.3 IgG histidine scanning variant #11"
EIVLTQSPATLSLSPGERATLSCRASESHDSYGHSHIHWYQQKPGQAPRLLIYRASNLESGIPARFSGSGSGTDFTLTISSLEPEDFAVYYCQQSNEEPLTFGQGTKVELK

SEQ ID NO: 437 - protein, 111 aa, Artificial Sequence
  source: /note="Description of Artificial Sequence: Synthetic polypeptide"
  source: /note="Light Chain Combinations of hucMET27Gv1.3 IgG histidine scanning variant #12"
EIVLTQSPATLSLSPGERATLSCRASESHDSYGHSFIHWYQQKPGQAPRLLIYRASNLEHGIPARFSGSGSGTDFTLTISSLEPEDFAVYYCQQSNEEPLTFGQGTKVELK

SEQ ID NO: 438 - protein, 111 aa, Artificial Sequence
  source: /note="Description of Artificial Sequence: Synthetic polypeptide"
  source: /note="Light Chain Combinations of hucMET27Gv1.3 IgG histidine scanning variant #13"
EIVLTQSPATLSLSPGERATLSCRASESHDSYGHSFIHWYQQKPGQAPRLLIYRASNLESGIPARFSGSGSGTDFTLTISSLEPEDFAVYYCQQSNEEHLTFGQGTKVELK

SEQ ID NO: 439 - protein, 111 aa, Artificial Sequence
  source: /note="Description of Artificial Sequence: Synthetic polypeptide"
  source: /note="Light Chain Combinations of hucMET27Gv1.3 IgG histidine scanning variant #14"
EIVLTQSPATLSLSPGERATLSCRASESHDSYGNSHIHWYQQKPGQAPRLLIYRASNLEHGIPARFSGSGSGTDFTLTISSLEPEDFAVYYCQQSNEEPLTFGQGTKVELK

SEQ ID NO: 440 - protein, 111 aa, Artificial Sequence
  source: /note="Description of Artificial Sequence: Synthetic polypeptide"
  source: /note="Light Chain Combinations of hucMET27Gv1.3 IgG histidine scanning variant #15"
EIVLTQSPATLSLSPGERATLSCRASESHDSYGNSHIHWYQQKPGQAPRLLIYRASNLESGIPARFSGSGSGTDFTLTISSLEPEDFAVYYCQQSNEEHLTFGQGTKVELK

SEQ ID NO: 441 - protein, 111 aa, Artificial Sequence
  source: /note="Description of Artificial Sequence: Synthetic polypeptide"
  source: /note="Light Chain Combinations of hucMET27Gv1.3 IgG histidine scanning variant #16"
EIVLTQSPATLSLSPGERATLSCRASESHDSYGNSFIHWYQQKPGQAPRLLIYRASNLEHGIPARFSGSGSGTDFTLTISSLEPEDFAVYYCQQSNEEHLTFGQGTKVELK

SEQ ID NO: 442 - protein, 111 aa, Artificial Sequence
  source: /note="Description of Artificial Sequence: Synthetic polypeptide"
  source: /note="Light Chain Combinations of hucMET27Gv1.3 IgG histidine scanning variant #17"
EIVLTQSPATLSLSPGERATLSCRASESVDSYGHSHIHWYQQKPGQAPRLLIYRASNLEHGIPARFSGSGSGTDFTLTISSLEPEDFAVYYCQQSNEEPLTFGQGTKVELK

SEQ ID NO: 443 - protein, 111 aa, Artificial Sequence
  source: /note="Description of Artificial Sequence: Synthetic polypeptide"
  source: /note="Light Chain Combinations of hucMET27Gv1.3 IgG histidine scanning variant #18"
EIVLTQSPATLSLSPGERATLSCRASESVDSYGHSHIHWYQQKPGQAPRLLIYRASNLESGIPARFSGSGSGTDFTLTISSLEPEDFAVYYCQQSNEEHLTFGQGTKVELK

SEQ ID NO: 444 - protein, 111 aa, Artificial Sequence
  source: /note="Description of Artificial Sequence: Synthetic polypeptide"
  source: /note="Light Chain Combinations of hucMET27Gv1.3 IgG histidine scanning variant #19"
EIVLTQSPATLSLSPGERATLSCRASESVDSYGHSFIHWYQQKPGQAPRLLIYRASNLEHGIPARFSGSGSGTDFTLTISSLEPEDFAVYYCQQSNEEHLTFGQGTKVELK

SEQ ID NO: 445 - protein, 111 aa, Artificial Sequence
  source: /note="Description of Artificial Sequence: Synthetic polypeptide"
  source: /note="Light Chain Combinations of hucMET27Gv1.3 IgG histidine scanning variant #20"
EIVLTQSPATLSLSPGERATLSCRASESVDSYGNSHIHWYQQKPGQAPRLLIYRASNLEHGIPARFSGSGSGTDFTLTISSLEPEDFAVYYCQQSNEEHLTFGQGTKVELK

SEQ ID NO: 446 - protein, 111 aa, Artificial Sequence
  source: /note="Description of Artificial Sequence: Synthetic polypeptide"
  source: /note="Light Chain Combinations of hucMET27Gv1.3 IgG histidine scanning variant #21"
EIVLTQSPATLSLSPGERATLSCRASESHDSHGNSFIHWYQQKPGQAPRLLIYRASNLESGIPARFSGSGSGTDFTLTISSLEPEDFAVYYCQQSNEEPLTFGQGTKVELK

SEQ ID NO: 447 - protein, 111 aa, Artificial Sequence
  source: /note="Description of Artificial Sequence: Synthetic polypeptide"
  source: /note="Light Chain Combinations of hucMET27Gv1.3 IgG histidine scanning variant #22"
EIVLTQSPATLSLSPGERATLSCRASESVDSHGHSFIHWYQQKPGQAPRLLIYRASNLESGIPARFSGSGSGTDFTLTISSLEPEDFAVYYCQQSNEEPLTFGQGTKVELK

SEQ ID NO: 448 - protein, 111 aa, Artificial Sequence
  source: /note="Description of Artificial Sequence: Synthetic polypeptide"
  source: /note="Light Chain Combinations of hucMET27Gv1.3 IgG histidine scanning variant #23"
EIVLTQSPATLSLSPGERATLSCRASESVDSHGNSHIHWYQQKPGQAPRLLIYRASNLESGIPARFSGSGSGTDFTLTISSLEPEDFAVYYCQQSNEEPLTFGQGTKVELK

SEQ ID NO: 449 - protein, 111 aa, Artificial Sequence
  source: /note="Description of Artificial Sequence: Synthetic polypeptide"
  source: /note="Light Chain Combinations of hucMET27Gv1.3 IgG histidine scanning variant #24"
EIVLTQSPATLSLSPGERATLSCRASESVDSHGNSFIHWYQQKPGQAPRLLIYRASNLEHGIPARFSGSGSGTDFTLTISSLEPEDFAVYYCQQSNEEPLTFGQGTKVELK

SEQ ID NO: 450 - protein, 111 aa, Artificial Sequence
  source: /note="Description of Artificial Sequence: Synthetic polypeptide"
  source: /note="Light Chain Combinations of hucMET27Gv1.3 IgG histidine scanning variant #25"
EIVLTQSPATLSLSPGERATLSCRASESVDSHGNSFIHWYQQKPGQAPRLLIYRASNLESGIPARFSGSGSGTDFTLTISSLEPEDFAVYYCQQSNEEHLTFGQGTKVELK

SEQ ID NO: 451 - protein, 111 aa, Artificial Sequence
  source: /note="Description of Artificial Sequence: Synthetic polypeptide"
  source: /note="Light Chain Combinations of hucMET27Gv1.3 IgG histidine scanning variant #26"
EIVLTQSPATLSLSPGERATLSCRASESHDSYGNSFIHWYQQKPGQAPRLLIYHASNLESGIPARFSGSGSGTDFTLTISSLEPEDFAVYYCQQSNEEPLTFGQGTKVELK

SEQ ID NO: 452 - protein, 111 aa, Artificial Sequence
  source: /note="Description of Artificial Sequence: Synthetic polypeptide"
  source: /note="Light Chain Combinations of hucMET27Gv1.3 IgG histidine scanning variant #27"
EIVLTQSPATLSLSPGERATLSCRASESVDSYGHSFIHWYQQKPGQAPRLLIYHASNLESGIPARFSGSGSGTDFTLTISSLEPEDFAVYYCQQSNEEPLTFGQGTKVELK

SEQ ID NO: 453 - protein, 111 aa, Artificial Sequence
  source: /note="Description of Artificial Sequence: Synthetic polypeptide"
  source: /note="Light Chain Combinations of hucMET27Gv1.3 IgG histidine scanning variant #28"
EIVLTQSPATLSLSPGERATLSCRASESVDSYGNSHIHWYQQKPGQAPRLLIYHASNLESGIPARFSGSGSGTDFTLTISSLEPEDFAVYYCQQSNEEPLTFGQGTKVELK

SEQ ID NO: 454 - protein, 111 aa, Artificial Sequence
  source: /note="Description of Artificial Sequence: Synthetic polypeptide"
  source: /note="Light Chain Combinations of hucMET27Gv1.3 IgG histidine scanning variant #29"
EIVLTQSPATLSLSPGERATLSCRASESVDSYGNSFIHWYQQKPGQAPRLLIYHASNLEHGIPARFSGSGSGTDFTLTISSLEPEDFAVYYCQQSNEEPLTFGQGTKVELK

SEQ ID NO: 455 - protein, 111 aa, Artificial Sequence
  source: /note="Description of Artificial Sequence: Synthetic polypeptide"
  source: /note="Light Chain Combinations of hucMET27Gv1.3 IgG histidine scanning variant #30"
EIVLTQSPATLSLSPGERATLSCRASESVDSYGNSFIHWYQQKPGQAPRLLIYHASNLESGIPARFSGSGSGTDFTLTISSLEPEDFAVYYCQQSNEEHLTFGQGTKVELK

SEQ ID NO: 456 - protein, 111 aa, Artificial Sequence
  source: /note="Description of Artificial Sequence: Synthetic polypeptide"
  source: /note="Light Chain Combinations of hucMET27Gv1.3 IgG histidine scanning variant #31"
EIVLTQSPATLSLSPGERATLSCRASESVDSHGNSFIHWYQQKPGQAPRLLIYHASNLESGIPARFSGSGSGTDFTLTISSLEPEDFAVYYCQQSNEEPLTFGQGTKVELK

SEQ ID NO: 457 - protein, 111 aa, Artificial Sequence
  source: /note="Description of Artificial Sequence: Synthetic polypeptide"
  source: /note="Light Chain Combinations of hucMET27Gv1.3 IgG histidine scanning variant #32"
EIVLTQSPATLSLSPGERATLSCRASESHDSHGNSFIHWYQQKPGQAPRLLIYHASNLESGIPARFSGSGSGTDFTLTISSLEPEDFAVYYCQQSNEEPLTFGQGTKVELK

SEQ ID NO: 458 - protein, 111 aa, Artificial Sequence
  source: /note="Description of Artificial Sequence: Synthetic polypeptide"
  source: /note="Light Chain Combinations of hucMET27Gv1.3 IgG histidine scanning variant #33"
EIVLTQSPATLSLSPGERATLSCRASESVDSHGHSFIHWYQQKPGQAPRLLIYHASNLESGIPARFSGSGSGTDFTLTISSLEPEDFAVYYCQQSNEEPLTFGQGTKVELK

SEQ ID NO: 459 - protein, 111 aa, Artificial Sequence
  source: /note="Description of Artificial Sequence: Synthetic polypeptide"
  source: /note="Light Chain Combinations of hucMET27Gv1.3 IgG histidine scanning variant #34"
EIVLTQSPATLSLSPGERATLSCRASESVDSHGNSHIHWYQQKPGQAPRLLIYHASNLESGIPARFSGSGSGTDFTLTISSLEPEDFAVYYCQQSNEEPLTFGQGTKVELK

SEQ ID NO: 460 - protein, 111 aa, Artificial Sequence
  source: /note="Description of Artificial Sequence: Synthetic polypeptide"
  source: /note="Light Chain Combinations of hucMET27Gv1.3 IgG histidine scanning variant #35"
EIVLTQSPATLSLSPGERATLSCRASESVDSHGNSFIHWYQQKPGQAPRLLIYHASNLEHGIPARFSGSGSGTDFTLTISSLEPEDFAVYYCQQSNEEPLTFGQGTKVELK

SEQ ID NO: 461 - protein, 111 aa, Artificial Sequence
  source: /note="Description of Artificial Sequence: Synthetic polypeptide"
  source: /note="Light Chain Combinations of hucMET27Gv1.3 IgG histidine scanning variant #36"
EIVLTQSPATLSLSPGERATLSCRASESVDSHGNSFIHWYQQKPGQAPRLLIYHASNLESGIPARFSGSGSGTDFTLTISSLEPEDFAVYYCQQSNEEHLTFGQGTKVELK

SEQ ID NO: 462 - protein, 111 aa, Artificial Sequence
  source: /note="Description of Artificial Sequence: Synthetic polypeptide"
  source: /note="Light Chain Combinations of hucMET27Gv1.3 IgG histidine scanning variant #37"
EIVLTQSPATLSLSPGERATLSCRASESHDSHGHSFIHWYQQKPGQAPRLLIYRASNLESGIPARFSGSGSGTDFTLTISSLEPEDFAVYYCQQSNEEPLTFGQGTKVELK

SEQ ID NO: 463 - protein, 111 aa, Artificial Sequence
  source: /note="Description of Artificial Sequence: Synthetic polypeptide"
  source: /note="Light Chain Combinations of hucMET27Gv1.3 IgG histidine scanning variant #38"
EIVLTQSPATLSLSPGERATLSCRASESHDSHGNSHIHWYQQKPGQAPRLLIYRASNLESGIPARFSGSGSGTDFTLTISSLEPEDFAVYYCQQSNEEPLTFGQGTKVELK

SEQ ID NO: 464 - protein, 111 aa, Artificial Sequence
  source: /note="Description of Artificial Sequence: Synthetic polypeptide"
  source: /note="Light Chain Combinations of hucMET27Gv1.3 IgG histidine scanning variant #39"
EIVLTQSPATLSLSPGERATLSCRASESHDSHGNSFIHWYQQKPGQAPRLLIYRASNLEHGIPARFSGSGSGTDFTLTISSLEPEDFAVYYCQQSNEEPLTFGQGTKVELK

SEQ ID NO: 465 - protein, 111 aa, Artificial Sequence
  source: /note="Description of Artificial Sequence: Synthetic polypeptide"
  source: /note="Light Chain Combinations of hucMET27Gv1.3 IgG histidine scanning variant #40"
EIVLTQSPATLSLSPGERATLSCRASESHDSHGNSFIHWYQQKPGQAPRLLIYRASNLESGIPARFSGSGSGTDFTLTISSLEPEDFAVYYCQQSNEEHLTFGQGTKVELK

SEQ ID NO: 466 - protein, 111 aa, Artificial Sequence
  source: /note="Description of Artificial Sequence: Synthetic polypeptide"
  source: /note="Light Chain Combinations of hucMET27Gv1.3 IgG histidine scanning variant #41"
EIVLTQSPATLSLSPGERATLSCRASESVDSHGHSHIHWYQQKPGQAPRLLIYRASNLESGIPARFSGSGSGTDFTLTISSLEPEDFAVYYCQQSNEEPLTFGQGTKVELK

SEQ ID NO: 467 - protein, 111 aa, Artificial Sequence
  source: /note="Description of Artificial Sequence: Synthetic polypeptide"
  source: /note="Light Chain Combinations of hucMET27Gv1.3 IgG histidine scanning variant #42"
EIVLTQSPATLSLSPGERATLSCRASESVDSHGHSFIHWYQQKPGQAPRLLIYRASNLEHGIPARFSGSGSGTDFTLTISSLEPEDFAVYYCQQSNEEPLTFGQGTKVELK

SEQ ID NO: 468 - protein, 111 aa, Artificial Sequence
  source: /note="Description of Artificial Sequence: Synthetic polypeptide"
  source: /note="Light Chain Combinations of hucMET27Gv1.3 IgG histidine scanning variant #43"
EIVLTQSPATLSLSPGERATLSCRASESVDSHGHSFIHWYQQKPGQAPRLLIYRASNLESGIPARFSGSGSGTDFTLTISSLEPEDFAVYYCQQSNEEHLTFGQGTKVELK

SEQ ID NO: 469 - protein, 111 aa, Artificial Sequence
  source: /note="Description of Artificial Sequence: Synthetic polypeptide"
  source: /note="Light Chain Combinations of hucMET27Gv1.3 IgG histidine scanning variant #44"
EIVLTQSPATLSLSPGERATLSCRASESVDSHGNSHIHWYQQKPGQAPRLLIYRASNLEHGIPARFSGSGSGTDFTLTISSLEPEDFAVYYCQQSNEEPLTFGQGTKVELK

SEQ ID NO: 470 - protein, 111 aa, Artificial Sequence
  source: /note="Description of Artificial Sequence: Synthetic polypeptide"
  source: /note="Light Chain Combinations of hucMET27Gv1.3 IgG histidine scanning variant #45"
EIVLTQSPATLSLSPGERATLSCRASESVDSHGNSHIHWYQQKPGQAPRLLIYRASNLESGIPARFSGSGSGTDFTLTISSLEPEDFAVYYCQQSNEEHLTFGQGTKVELK

SEQ ID NO: 471 - protein, 111 aa, Artificial Sequence
  source: /note="Description of Artificial Sequence: Synthetic polypeptide"
  source: /note="Light Chain Combinations of hucMET27Gv1.3 IgG histidine scanning variant #46"
EIVLTQSPATLSLSPGERATLSCRASESVDSHGNSFIHWYQQKPGQAPRLLIYRASNLEHGIPARFSGSGSGTDFTLTISSLEPEDFAVYYCQQSNEEHLTFGQGTKVELK

SEQ ID NO: 472 - protein, 111 aa, Artificial Sequence
  source: /note="Description of Artificial Sequence: Synthetic polypeptide"
  source: /note="Light Chain Combinations of hucMET27Gv1.3 IgG histidine scanning variant #47"
EIVLTQSPATLSLSPGERATLSCRASESHDSHGHSHIHWYQQKPGQAPRLLIYRASNLESGIPARFSGSGSGTDFTLTISSLEPEDFAVYYCQQSNEEPLTFGQGTKVELK

SEQ ID NO: 473 - protein, 111 aa, Artificial Sequence
  source: /note="Description of Artificial Sequence: Synthetic polypeptide"
  source: /note="Light Chain Combinations of hucMET27Gv1.3 IgG histidine scanning variant #48"
EIVLTQSPATLSLSPGERATLSCRASESHDSHGHSFIHWYQQKPGQAPRLLIYRASNLEHGIPARFSGSGSGTDFTLTISSLEPEDFAVYYCQQSNEEPLTFGQGTKVELK

SEQ ID NO: 474 - protein, 111 aa, Artificial Sequence
  source: /note="Description of Artificial Sequence: Synthetic polypeptide"
  source: /note="Light Chain Combinations of hucMET27Gv1.3 IgG histidine scanning variant #49"
EIVLTQSPATLSLSPGERATLSCRASESHDSHGHSFIHWYQQKPGQAPRLLIYRASNLESGIPARFSGSGSGTDFTLTISSLEPEDFAVYYCQQSNEEHLTFGQGTKVELK

SEQ ID NO: 475 - protein, 111 aa, Artificial Sequence
  source: /note="Description of Artificial Sequence: Synthetic polypeptide"
  source: /note="Light Chain Combinations of hucMET27Gv1.3 IgG histidine scanning variant #50"
EIVLTQSPATLSLSPGERATLSCRASESHDSHGNSHIHWYQQKPGQAPRLLIYRASNLEHGIPARFSGSGSGTDFTLTISSLEPEDFAVYYCQQSNEEPLTFGQGTKVELK

SEQ ID NO: 476 - protein, 111 aa, Artificial Sequence
  source: /note="Description of Artificial Sequence: Synthetic polypeptide"
  source: /note="Light Chain Combinations of hucMET27Gv1.3 IgG histidine scanning variant #51"
EIVLTQSPATLSLSPGERATLSCRASESHDSHGNSHIHWYQQKPGQAPRLLIYRASNLESGIPARFSGSGSGTDFTLTISSLEPEDFAVYYCQQSNEEHLTFGQGTKVELK

SEQ ID NO: 477 - protein, 111 aa, Artificial Sequence
  source: /note="Description of Artificial Sequence: Synthetic polypeptide"
  source: /note="Light Chain Combinations of hucMET27Gv1.3 IgG histidine scanning variant #52"
EIVLTQSPATLSLSPGERATLSCRASESHDSHGNSFIHWYQQKPGQAPRLLIYRASNLEHGIPARFSGSGSGTDFTLTISSLEPEDFAVYYCQQSNEEHLTFGQGTKVELK

SEQ ID NO: 478 - protein, 111 aa, Artificial Sequence
  source: /note="Description of Artificial Sequence: Synthetic polypeptide"
  source: /note="Light Chain Combinations of hucMET27Gv1.3 IgG histidine scanning variant #53"
EIVLTQSPATLSLSPGERATLSCRASESVDSHGHSHIHWYQQKPGQAPRLLIYRASNLEHGIPARFSGSGSGTDFTLTISSLEPEDFAVYYCQQSNEEPLTFGQGTKVELK

SEQ ID NO: 479 - protein, 111 aa, Artificial Sequence
  source: /note="Description of Artificial Sequence: Synthetic polypeptide"
  source: /note="Light Chain Combinations of hucMET27Gv1.3 IgG histidine scanning variant #54"
EIVLTQSPATLSLSPGERATLSCRASESVDSHGHSHIHWYQQKPGQAPRLLIYRASNLESGIPARFSGSGSGTDFTLTISSLEPEDFAVYYCQQSNEEHLTFGQGTKVELK

SEQ ID NO: 480 - protein, 111 aa, Artificial Sequence
  source: /note="Description of Artificial Sequence: Synthetic polypeptide"
  source: /note="Light Chain Combinations of hucMET27Gv1.3 IgG histidine scanning variant #55"
EIVLTQSPATLSLSPGERATLSCRASESVDSHGHSFIHWYQQKPGQAPRLLIYRASNLEHGIPARFSGSGSGTDFTLTISSLEPEDFAVYYCQQSNEEHLTFGQGTKVELK

SEQ ID NO: 481 - protein, 111 aa, Artificial Sequence
  source: /note="Description of Artificial Sequence: Synthetic polypeptide"
  source: /note="Light Chain Combinations of hucMET27Gv1.3 IgG histidine scanning variant #56"
EIVLTQSPATLSLSPGERATLSCRASESVDSHGNSHIHWYQQKPGQAPRLLIYRASNLEHGIPARFSGSGSGTDFTLTISSLEPEDFAVYYCQQSNEEHLTFGQGTKVELK

SEQ ID NO: 482 - protein, 111 aa, Artificial Sequence
  source: /note="Description of Artificial Sequence: Synthetic polypeptide"
  source: /note="Light Chain Combinations of hucMET27Gv1.3 IgG histidine scanning variant #57"
EIVLTQSPATLSLSPGERATLSCRASESHDSYGHSFIHWYQQKPGQAPRLLIYHASNLESGIPARFSGSGSGTDFTLTISSLEPEDFAVYYCQQSNEEPLTFGQGTKVELK

SEQ ID NO: 483 - protein, 111 aa, Artificial Sequence
  source: /note="Description of Artificial Sequence: Synthetic polypeptide"
  source: /note="Light Chain Combinations of hucMET27Gv1.3 IgG histidine scanning variant #58"
EIVLTQSPATLSLSPGERATLSCRASESHDSYGNSHIHWYQQKPGQAPRLLIYHASNLESGIPARFSGSGSGTDFTLTISSLEPEDFAVYYCQQSNEEPLTFGQGTKVELK

SEQ ID NO: 484 - protein, 111 aa, Artificial Sequence
  source: /note="Description of Artificial Sequence: Synthetic polypeptide"
  source: /note="Light Chain Combinations of hucMET27Gv1.3 IgG histidine scanning variant #59"
EIVLTQSPATLSLSPGERATLSCRASESHDSYGNSFIHWYQQKPGQAPRLLIYHASNLEHGIPARFSGSGSGTDFTLTISSLEPEDFAVYYCQQSNEEPLTFGQGTKVELK

SEQ ID NO: 485 - protein, 111 aa, Artificial Sequence
  source: /note="Description of Artificial Sequence: Synthetic polypeptide"
  source: /note="Light Chain Combinations of hucMET27Gv1.3 IgG histidine scanning variant #60"
EIVLTQSPATLSLSPGERATLSCRASESHDSYGNSFIHWYQQKPGQAPRLLIYHASNLESGIPARFSGSGSGTDFTLTISSLEPEDFAVYYCQQSNEEHLTFGQGTKVELK

SEQ ID NO: 486 - protein, 111 aa, Artificial Sequence
  source: /note="Description of Artificial Sequence: Synthetic polypeptide"
  source: /note="Light Chain Combinations of hucMET27Gv1.3 IgG histidine scanning variant #61"
EIVLTQSPATLSLSPGERATLSCRASESVDSYGHSHIHWYQQKPGQAPRLLIYHASNLESGIPARFSGSGSGTDFTLTISSLEPEDFAVYYCQQSNEEPLTFGQGTKVELK

SEQ ID NO: 487 - protein, 111 aa, Artificial Sequence
  source: /note="Description of Artificial Sequence: Synthetic polypeptide"
  source: /note="Light Chain Combinations of hucMET27Gv1.3 IgG histidine scanning variant #62"
EIVLTQSPATLSLSPGERATLSCRASESVDSYGHSFIHWYQQKPGQAPRLLIYHASNLEHGIPARFSGSGSGTDFTLTISSLEPEDFAVYYCQQSNEEPLTFGQGTKVELK

SEQ ID NO: 488 - protein, 111 aa, Artificial Sequence
  source: /note="Description of Artificial Sequence: Synthetic polypeptide"
  source: /note="Light Chain Combinations of hucMET27Gv1.3 IgG histidine scanning variant #63"
EIVLTQSPATLSLSPGERATLSCRASESVDSYGHSFIHWYQQKPGQAPRLLIYHASNLESGIPARFSGSGSGTDFTLTISSLEPEDFAVYYCQQSNEEHLTFGQGTKVELK

SEQ ID NO: 489 - protein, 111 aa, Artificial Sequence
  source: /note="Description of Artificial Sequence: Synthetic polypeptide"
  source: /note="Light Chain Combinations of hucMET27Gv1.3 IgG histidine scanning variant #64"
EIVLTQSPATLSLSPGERATLSCRASESVDSYGNSHIHWYQQKPGQAPRLLIYHASNLEHGIPARFSGSGSGTDFTLTISSLEPEDFAVYYCQQSNEEPLTFGQGTKVELK

SEQ ID NO: 490 - protein, 111 aa, Artificial Sequence
  source: /note="Description of Artificial Sequence: Synthetic polypeptide"
  source: /note="Light Chain Combinations of hucMET27Gv1.3 IgG histidine scanning variant #65"
EIVLTQSPATLSLSPGERATLSCRASESVDSYGNSHIHWYQQKPGQAPRLLIYHASNLESGIPARFSGSGSGTDFTLTISSLEPEDFAVYYCQQSNEEHLTFGQGTKVELK

SEQ ID NO: 491 - protein, 111 aa, Artificial Sequence
  source: /note="Description of Artificial Sequence: Synthetic polypeptide"
  source: /note="Light Chain Combinations of hucMET27Gv1.3 IgG histidine scanning variant #66"
EIVLTQSPATLSLSPGERATLSCRASESVDSYGNSFIHWYQQKPGQAPRLLIYHASNLEHGIPARFSGSGSGTDFTLTISSLEPEDFAVYYCQQSNEEHLTFGQGTKVELK

SEQ ID NO: 492 - protein, 111 aa, Artificial Sequence
  source: /note="Description of Artificial Sequence: Synthetic polypeptide"
  source: /note="Light Chain Combinations of hucMET27Gv1.3 IgG histidine scanning variant #67"
EIVLTQSPATLSLSPGERATLSCRASESHDSYGHSHIHWYQQKPGQAPRLLIYHASNLESGIPARFSGSGSGTDFTLTISSLEPEDFAVYYCQQSNEEPLTFGQGTKVELK

SEQ ID NO: 493 - protein, 111 aa, Artificial Sequence
  source: /note="Description of Artificial Sequence: Synthetic polypeptide"
  source: /note="Light Chain Combinations of hucMET27Gv1.3 IgG histidine scanning variant #68"
EIVLTQSPATLSLSPGERATLSCRASESHDSYGHSFIHWYQQKPGQAPRLLIYHASNLEHGIPARFSGSGSGTDFTLTISSLEPEDFAVYYCQQSNEEPLTFGQGTKVELK

SEQ ID NO: 494 - protein, 111 aa, Artificial Sequence
  source: /note="Description of Artificial Sequence: Synthetic polypeptide"
  source: /note="Light Chain Combinations of hucMET27Gv1.3 IgG histidine scanning variant #69"
EIVLTQSPATLSLSPGERATLSCRASESHDSYGHSFIHWYQQKPGQAPRLLIYHASNLESGIPARFSGSGSGTDFTLTISSLEPEDFAVYYCQQSNEEHLTFGQGTKVELK

SEQ ID NO: 495 - protein, 111 aa, Artificial Sequence
  source: /note="Description of Artificial Sequence: Synthetic polypeptide"
  source: /note="Light Chain Combinations of hucMET27Gv1.3 IgG histidine scanning variant #70"
EIVLTQSPATLSLSPGERATLSCRASESHDSYGNSHIHWYQQKPGQAPRLLIYHASNLEHGIPARFSGSGSGTDFTLTISSLEPEDFAVYYCQQSNEEPLTFGQGTKVELK

SEQ ID NO: 496 - protein, 111 aa, Artificial Sequence
  source: /note="Description of Artificial Sequence: Synthetic polypeptide"
  source: /note="Light Chain Combinations of hucMET27Gv1.3 IgG histidine scanning variant #71"
EIVLTQSPATLSLSPGERATLSCRASESHDSYGNSHIHWYQQKPGQAPRLLIYHASNLESGIPARFSGSGSGTDFTLTISSLEPEDFAVYYCQQSNEEHLTFGQGTKVELK

SEQ ID NO: 497 - protein, 111 aa, Artificial Sequence
  source: /note="Description of Artificial Sequence: Synthetic polypeptide"
  source: /note="Light Chain Combinations of hucMET27Gv1.3 IgG histidine scanning variant #72"
EIVLTQSPATLSLSPGERATLSCRASESHDSYGNSFIHWYQQKPGQAPRLLIYHASNLEHGIPARFSGSGSGTDFTLTISSLEPEDFAVYYCQQSNEEHLTFGQGTKVELK

SEQ ID NO: 498 - protein, 111 aa, Artificial Sequence
  source: /note="Description of Artificial Sequence: Synthetic polypeptide"
  source: /note="Light Chain Combinations of hucMET27Gv1.3 IgG histidine scanning variant #73"
EIVLTQSPATLSLSPGERATLSCRASESVDSYGHSHIHWYQQKPGQAPRLLIYHASNLEHGIPARFSGSGSGTDFTLTISSLEPEDFAVYYCQQSNEEPLTFGQGTKVELK

SEQ ID NO: 499 - protein, 111 aa, Artificial Sequence
  source: /note="Description of Artificial Sequence: Synthetic polypeptide"
  source: /note="Light Chain Combinations of hucMET27Gv1.3 IgG histidine scanning variant #74"
EIVLTQSPATLSLSPGERATLSCRASESVDSYGHSHIHWYQQKPGQAPRLLIYHASNLESGIPARFSGSGSGTDFTLTISSLEPEDFAVYYCQQSNEEHLTFGQGTKVELK

SEQ ID NO: 500 - protein, 111 aa, Artificial Sequence
  source: /note="Description of Artificial Sequence: Synthetic polypeptide"
  source: /note="Light Chain Combinations of hucMET27Gv1.3 IgG histidine scanning variant #75"
EIVLTQSPATLSLSPGERATLSCRASESVDSYGHSFIHWYQQKPGQAPRLLIYHASNLEHGIPARFSGSGSGTDFTLTISSLEPEDFAVYYCQQSNEEHLTFGQGTKVELK

SEQ ID NO: 501 - protein, 111 aa, Artificial Sequence
  source: /note="Description of Artificial Sequence: Synthetic polypeptide"
  source: /note="Light Chain Combinations of hucMET27Gv1.3 IgG histidine scanning variant #76"
EIVLTQSPATLSLSPGERATLSCRASESVDSYGNSHIHWYQQKPGQAPRLLIYHASNLEHGIPARFSGSGSGTDFTLTISSLEPEDFAVYYCQQSNEEHLTFGQGTKVELK

SEQ ID NO: 502 - protein, 119 aa, Artificial Sequence
  source: /note="Description of Artificial Sequence: Synthetic polypeptide"
  source: /note="Heavy Chain of P3D12 IgG"
QVQLVQSGAEVKKPGASVKVSCKASGYTFTSYWMHWVKQAPGQGLDWIGYIKPSTDNTEYNQKFKDKATLTADKSTSTAYMELSSLRSEDTAVYYCARSYGNYPLMDYWGQGTTVTVSS

SEQ ID NO: 503 - protein, 108 aa, Artificial Sequence
  source: /note="Description of Artificial Sequence: Synthetic polypeptide"
  source: /note="Light Chain of P3D12 IgG"
QIVLTQSPAILSLSPGERATLSCSASSSVTSNYLYWYQQKPGSSPKLLIYSTSNLASGVPARFSGSGSGTSYTLTISSLEAEDAASYFCHQWSSYPPTFGSGTKLEIK

SEQ ID NO: 504 - protein, 10 aa, Artificial Sequence
  source: /note="Description of Artificial Sequence: Synthetic peptide"
  source: /note="Heavy Chain CDR1 of P3D12"
GYTFTSYWMH

SEQ ID NO: 505 - protein, 17 aa, Artificial Sequence
  source: /note="Description of Artificial Sequence: Synthetic peptide"
  source: /note="Heavy Chain CDR2 of P3D12"
YIKPSTDNTEYNQKFKD

SEQ ID NO: 506 - protein, 12 aa, Artificial Sequence
  source: /note="Description of Artificial Sequence: Synthetic peptide"
  source: /note="Heavy Chain CDR3 of P3D12"
ARSYGNYPLMDY

SEQ ID NO: 507 - protein, 12 aa, Artificial Sequence
  source: /note="Description of Artificial Sequence: Synthetic peptide"
  source: /note="Light Chain CDR1 of P3D12"
SASSSVTSNYLY

SEQ ID NO: 508 - protein, 7 aa, Artificial Sequence
  source: /note="Description of Artificial Sequence: Synthetic peptide"
  source: /note="Light Chain CDR2 of P3D12"
STSNLAS

SEQ ID NO: 509 - protein, 9 aa, Artificial Sequence
  source: /note="Description of Artificial Sequence: Synthetic peptide"
  source: /note="Light Chain CDR3 of P3D12"
HQWSSYPPT

SEQ ID NO: 510 - protein, 119 aa, Artificial Sequence
  source: /note="Description of Artificial Sequence: Synthetic polypeptide"
  source: /note="Heavy Chain of P3D12 IgG histidine scanning variant #1"
QVQLVQSGAEVKKPGASVKVSCKASHYTFTSYWMHWVKQAPGQGLDWIGYIKPSTDNTEYNQKFKDKATLTADKSTSTAYMELSSLRSEDTAVYYCARSYGNYPLMDYWGQGTTVTVSS

SEQ ID NO: 511 - protein, 119 aa, Artificial Sequence
  source: /note="Description of Artificial Sequence: Synthetic polypeptide"
  source: /note="Heavy Chain of P3D12 IgG histidine scanning variant #2"
QVQLVQSGAEVKKPGASVKVSCKASGHTFTSYWMHWVKQAPGQGLDWIGYIKPSTDNTEYNQKFKDKATLTADKSTSTAYMELSSLRSEDTAVYYCARSYGNYPLMDYWGQGTTVTVSS

SEQ ID NO: 512 - protein, 119 aa, Artificial Sequence
  source: /note="Description of Artificial Sequence: Synthetic polypeptide"
  source: /note="Heavy Chain of P3D12 IgG histidine scanning variant #3"
QVQLVQSGAEVKKPGASVKVSCKASGYHFTSYWMHWVKQAPGQGLDWIGYIKPSTDNTEYNQKFKDKATLTADKSTSTAYMELSSLRSEDTAVYYCARSYGNYPLMDYWGQGTTVTVSS

SEQ ID NO: 513 - protein, 119 aa, Artificial Sequence
  source: /note="Description of Artificial Sequence: Synthetic polypeptide"
  source: /note="Heavy Chain of P3D12 IgG histidine scanning variant #4"
QVQLVQSGAEVKKPGASVKVSCKASGYTHTSYWMHWVKQAPGQGLDWIGYIKPSTDNTEYNQKFKDKATLTADKSTSTAYMELSSLRSEDTAVYYCARSYGNYPLMDYWGQGTTVTVSS

SEQ ID NO: 514 - protein, 119 aa, Artificial Sequence
  source: /note="Description of Artificial Sequence: Synthetic polypeptide"
  source: /note="Heavy Chain of P3D12 IgG histidine scanning variant #5"
QVQLVQSGAEVKKPGASVKVSCKASGYTFHSYWMHWVKQAPGQGLDWIGYIKPSTDNTEYNQKFKDKATLTADKSTSTAYMELSSLRSEDTAVYYCARSYGNYPLMDYWGQGTTVTVSS

SEQ ID NO: 515 - protein, 119 aa, Artificial Sequence
  source: /note="Description of Artificial Sequence: Synthetic polypeptide"
  source: /note="Heavy Chain of P3D12 IgG histidine scanning variant #6"
QVQLVQSGAEVKKPGASVKVSCKASGYTFTHYWMHWVKQAPGQGLDWIGYIKPSTDNTEYNQKFKDKATLTADKSTSTAYMELSSLRSEDTAVYYCARSYGNYPLMDYWGQGTTVTVSS

SEQ ID NO: 516 - protein, 119 aa, Artificial Sequence
  source: /note="Description of Artificial Sequence: Synthetic polypeptide"
  source: /note="Heavy Chain of P3D12 IgG histidine scanning variant #7"
QVQLVQSGAEVKKPGASVKVSCKASGYTFTSHWMHWVKQAPGQGLDWIGYIKPSTDNTEYNQKFKDKATLTADKSTSTAYMELSSLRSEDTAVYYCARSYGNYPLMDYWGQGTTVTVSS

SEQ ID NO: 517 - protein, 119 aa, Artificial Sequence
  source: /note="Description of Artificial Sequence: Synthetic polypeptide"
  source: /note="Heavy Chain of P3D12 IgG histidine scanning variant #8"
QVQLVQSGAEVKKPGASVKVSCKASGYTFTSYHMHWVKQAPGQGLDWIGYIKPSTDNTEYNQKFKDKATLTADKSTSTAYMELSSLRSEDTAVYYCARSYGNYPLMDYWGQGTTVTVSS

SEQ ID NO: 518 - protein, 119 aa, Artificial Sequence
  source: /note="Description of Artificial Sequence: Synthetic polypeptide"
  source: /note="Heavy Chain of P3D12 IgG histidine scanning variant #9"
QVQLVQSGAEVKKPGASVKVSCKASGYTFTSYWHHWVKQAPGQGLDWIGYIKPSTDNTEYNQKFKDKATLTADKSTSTAYMELSSLRSEDTAVYYCARSYGNYPLMDYWGQGTTVTVSS

SEQ ID NO: 519 - protein, 119 aa, Artificial Sequence
  source: /note="Description of Artificial Sequence: Synthetic polypeptide"
  source: /note="Heavy Chain of P3D12 IgG histidine scanning variant #10"
QVQLVQSGAEVKKPGASVKVSCKASGYTFTSYWMAWVKQAPGQGLDWIGYIKPSTDNTEYNQKFKDKATLTADKSTSTAYMELSSLRSEDTAVYYCARSYGNYPLMDYWGQGTTVTVSS

SEQ ID NO: 520 - protein, 119 aa, Artificial Sequence
  source: /note="Description of Artificial Sequence: Synthetic polypeptide"
  source: /note="Heavy Chain of P3D12 IgG histidine scanning variant #11"
QVQLVQSGAEVKKPGASVKVSCKASGYTFTSYWMHWVKQAPGQGLDWIGHIKPSTDNTEYNQKFKDKATLTADKSTSTAYMELSSLRSEDTAVYYCARSYGNYPLMDYWGQGTTVTVSS

SEQ ID NO: 521 - protein, 119 aa, Artificial Sequence
  source: /note="Description of Artificial Sequence: Synthetic polypeptide"
  source: /note="Heavy Chain of P3D12 IgG histidine scanning variant #12"
QVQLVQSGAEVKKPGASVKVSCKASGYTFTSYWMHWVKQAPGQGLDWIGYHKPSTDNTEYNQKFKDKATLTADKSTSTAYMELSSLRSEDTAVYYCARSYGNYPLMDYWGQGTTVTVSS

SEQ ID NO: 522 - protein, 119 aa, Artificial Sequence
  source: /note="Description of Artificial Sequence: Synthetic polypeptide"
  source: /note="Heavy Chain of P3D12 IgG histidine scanning variant #13"
QVQLVQSGAEVKKPGASVKVSCKASGYTFTSYWMHWVKQAPGQGLDWIGYIHPSTDNTEYNQKFKDKATLTADKSTSTAYMELSSLRSEDTAVYYCARSYGNYPLMDYWGQGTTVTVSS

SEQ ID NO: 523 - protein, 119 aa, Artificial Sequence
  source: /note="Description of Artificial Sequence: Synthetic polypeptide"
  source: /note="Heavy Chain of P3D12 IgG histidine scanning variant #14"
QVQLVQSGAEVKKPGASVKVSCKASGYTFTSYWMHWVKQAPGQGLDWIGYIKHSTDNTEYNQKFKDKATLTADKSTSTAYMELSSLRSEDTAVYYCARSYGNYPLMDYWGQGTTVTVSS

SEQ ID NO: 524 - protein, 119 aa, Artificial Sequence
  source: /note="Description of Artificial Sequence: Synthetic polypeptide"
  source: /note="Heavy Chain of P3D12 IgG histidine scanning variant #15"
QVQLVQSGAEVKKPGASVKVSCKASGYTFTSYWMHWVKQAPGQGLDWIGYIKPHTDNTEYNQKFKDKATLTADKSTSTAYMELSSLRSEDTAVYYCARSYGNYPLMDYWGQGTTVTVSS

SEQ ID NO: 525 - protein, 119 aa, Artificial Sequence
  source: /note="Description of Artificial Sequence: Synthetic polypeptide"
  source: /note="Heavy Chain of P3D12 IgG histidine scanning variant #16"
QVQLVQSGAEVKKPGASVKVSCKASGYTFTSYWMHWVKQAPGQGLDWIGYIKPSHDNTEYNQKFKDKATLTADKSTSTAYMELSSLRSEDTAVYYCARSYGNYPLMDYWGQGTTVTVSS

SEQ ID NO: 526 - protein, 119 aa, Artificial Sequence
  source: /note="Description of Artificial Sequence: Synthetic polypeptide"
  source: /note="Heavy Chain of P3D12 IgG histidine scanning variant #17"
QVQLVQSGAEVKKPGASVKVSCKASGYTFTSYWMHWVKQAPGQGLDWIGYIKPSTHNTEYNQKFKDKATLTADKSTSTAYMELSSLRSEDTAVYYCARSYGNYPLMDYWGQGTTVTVSS

SEQ ID NO: 527 - protein, 119 aa, Artificial Sequence
  source: /note="Description of Artificial Sequence: Synthetic polypeptide"
  source: /note="Heavy Chain of P3D12 IgG histidine scanning variant #18"
QVQLVQSGAEVKKPGASVKVSCKASGYTFTSYWMHWVKQAPGQGLDWIGYIKPSTDHTEYNQKFKDKATLTADKSTSTAYMELSSLRSEDTAVYYCARSYGNYPLMDYWGQGTTVTVSS

SEQ ID NO: 528 - protein, 119 aa, Artificial Sequence
  source: /note="Description of Artificial Sequence: Synthetic polypeptide"
  source: /note="Heavy Chain of P3D12 IgG histidine scanning variant #19"
QVQLVQSGAEVKKPGASVKVSCKASGYTFTSYWMHWVKQAPGQGLDWIGYIKPSTDNHEYNQKFKDKATLTADKSTSTAYMELSSLRSEDTAVYYCARSYGNYPLMDYWGQGTTVTVSS

SEQ ID NO: 529 - protein, 119 aa, Artificial Sequence
  source: /note="Description of Artificial Sequence: Synthetic polypeptide"
  source: /note="Heavy Chain of P3D12 IgG histidine scanning variant #20"
QVQLVQSGAEVKKPGASVKVSCKASGYTFTSYWMHWVKQAPGQGLDWIGYIKPSTDNTHYNQKFKDKATLTADKSTSTAYMELSSLRSEDTAVYYCARSYGNYPLMDYWGQGTTVTVSS

SEQ ID NO: 530 - protein, 119 aa, Artificial Sequence
  source: /note="Description of Artificial Sequence: Synthetic polypeptide"
  source: /note="Heavy Chain of P3D12 IgG histidine scanning variant #21"
QVQLVQSGAEVKKPGASVKVSCKASGYTFTSYWMHWVKQAPGQGLDWIGYIKPSTDNTEHNQKFKDKATLTADKSTSTAYMELSSLRSEDTAVYYCARSYGNYPLMDYWGQGTTVTVSS

SEQ ID NO: 531 - protein, 119 aa, Artificial Sequence
  source: /note="Description of Artificial Sequence: Synthetic polypeptide"
  source: /note="Heavy Chain of P3D12 IgG histidine scanning variant #22"
QVQLVQSGAEVKKPGASVKVSCKASGYTFTSYWMHWVKQAPGQGLDWIGYIKPSTDNTEYHQKFKDKATLTADKSTSTAYMELSSLRSEDTAVYYCARSYGNYPLMDYWGQGTTVTVSS

SEQ ID NO: 532 - protein, 119 aa, Artificial Sequence
  source: /note="Description of Artificial Sequence: Synthetic polypeptide"
  source: /note="Heavy Chain of P3D12 IgG histidine scanning variant #23"
QVQLVQSGAEVKKPGASVKVSCKASGYTFTSYWMHWVKQAPGQGLDWIGYIKPSTDNTEYNHKFKDKATLTADKSTSTAYMELSSLRSEDTAVYYCARSYGNYPLMDYWGQGTTVTVSS

SEQ ID NO: 533 - protein, 119 aa, Artificial Sequence
  source: /note="Description of Artificial Sequence: Synthetic polypeptide"
  source: /note="Heavy Chain of P3D12 IgG histidine scanning variant #24"
QVQLVQSGAEVKKPGASVKVSCKASGYTFTSYWMHWVKQAPGQGLDWIGYIKPSTDNTEYNQHFKDKATLTADKSTSTAYMELSSLRSEDTAVYYCARSYGNYPLMDYWGQGTTVTVSS

SEQ ID NO: 534 - protein, 119 aa, Artificial Sequence
  source: /note="Description of Artificial Sequence: Synthetic polypeptide"
  source: /note="Heavy Chain of P3D12 IgG histidine scanning variant #25"
QVQLVQSGAEVKKPGASVKVSCKASGYTFTSYWMHWVKQAPGQGLDWIGYIKPSTDNTEYNQKHKDKATLTADKSTSTAYMELSSLRSEDTAVYYCARSYGNYPLMDYWGQGTTVTVSS

SEQ ID NO: 535 - protein, 119 aa, Artificial Sequence
  source: /note="Description of Artificial Sequence: Synthetic polypeptide"
  source: /note="Heavy Chain of P3D12 IgG histidine scanning variant #26"
QVQLVQSGAEVKKPGASVKVSCKASGYTFTSYWMHWVKQAPGQGLDWIGYIKPSTDNTEYNQKFHDKATLTADKSTSTAYMELSSLRSEDTAVYYCARSYGNYPLMDYWGQGTTVTVSS

SEQ ID NO: 536 - protein, 119 aa, Artificial Sequence
  source: /note="Description of Artificial Sequence: Synthetic polypeptide"
  source: /note="Heavy Chain of P3D12 IgG histidine scanning variant #27"
QVQLVQSGAEVKKPGASVKVSCKASGYTFTSYWMHWVKQAPGQGLDWIGYIKPSTDNTEYNQKFKHKATLTADKSTSTAYMELSSLRSEDTAVYYCARSYGNYPLMDYWGQGTTVTVSS

SEQ ID NO: 537 - protein, 119 aa, Artificial Sequence
  source: /note="Description of Artificial Sequence: Synthetic polypeptide"
  source: /note="Heavy Chain of P3D12 IgG histidine scanning variant #28"
QVQLVQSGAEVKKPGASVKVSCKASGYTFTSYWMHWVKQAPGQGLDWIGYIKPSTDNTEYNQKFKDKATLTADKSTSTAYMELSSLRSEDTAVYYCHRSYGNYPLMDYWGQGTTVTVSS

SEQ ID NO: 538 - protein, 119 aa, Artificial Sequence
  source: /note="Description of Artificial Sequence: Synthetic polypeptide"
  source: /note="Heavy Chain of P3D12 IgG histidine scanning variant #29"
QVQLVQSGAEVKKPGASVKVSCKASGYTFTSYWMHWVKQAPGQGLDWIGYIKPSTDNTEYNQKFKDKATLTADKSTSTAYMELSSLRSEDTAVYYCAHSYGNYPLMDYWGQGTTVTVSS

SEQ ID NO: 539 - protein, 119 aa, Artificial Sequence
  source: /note="Description of Artificial Sequence: Synthetic polypeptide"
  source: /note="Heavy Chain of P3D12 IgG histidine scanning variant #30"
QVQLVQSGAEVKKPGASVKVSCKASGYTFTSYWMHWVKQAPGQGLDWIGYIKPSTDNTEYNQKFKDKATLTADKSTSTAYMELSSLRSEDTAVYYCARHYGNYPLMDYWGQGTTVTVSS

SEQ ID NO: 540 - protein, 119 aa, Artificial Sequence
  source: /note="Description of Artificial Sequence: Synthetic polypeptide"
  source: /note="Heavy Chain of P3D12 IgG histidine scanning variant #31"
QVQLVQSGAEVKKPGASVKVSCKASGYTFTSYWMHWVKQAPGQGLDWIGYIKPSTDNTEYNQKFKDKATLTADKSTSTAYMELSSLRSEDTAVYYCARSHGNYPLMDYWGQGTTVTVSS

SEQ ID NO: 541 - protein, 119 aa, Artificial Sequence
  source: /note="Description of Artificial Sequence: Synthetic polypeptide"
  source: /note="Heavy Chain of P3D12 IgG histidine scanning variant #32"
QVQLVQSGAEVKKPGASVKVSCKASGYTFTSYWMHWVKQAPGQGLDWIGYIKPSTDNTEYNQKFKDKATLTADKSTSTAYMELSSLRSEDTAVYYCARSYHNYPLMDYWGQGTTVTVSS

SEQ ID NO: 542 - protein, 119 aa, Artificial Sequence
  source: /note="Description of Artificial Sequence: Synthetic polypeptide"
  source: /note="Heavy Chain of P3D12 IgG histidine scanning variant #33"
QVQLVQSGAEVKKPGASVKVSCKASGYTFTSYWMHWVKQAPGQGLDWIGYIKPSTDNTEYNQKFKDKATLTADKSTSTAYMELSSLRSEDTAVYYCARSYGHYPLMDYWGQGTTVTVSS

SEQ ID NO: 543 - protein, 119 aa, Artificial Sequence
  source: /note="Description of Artificial Sequence: Synthetic polypeptide"
  source: /note="Heavy Chain of P3D12 IgG histidine scanning variant #34"
QVQLVQSGAEVKKPGASVKVSCKASGYTFTSYWMHWVKQAPGQGLDWIGYIKPSTDNTEYNQKFKDKATLTADKSTSTAYMELSSLRSEDTAVYYCARSYGNHPLMDYWGQGTTVTVSS

SEQ ID NO: 544 - protein, 119 aa, Artificial Sequence
  source: /note="Description of Artificial Sequence: Synthetic polypeptide"
  source: /note="Heavy Chain of P3D12 IgG histidine scanning variant #35"
QVQLVQSGAEVKKPGASVKVSCKASGYTFTSYWMHWVKQAPGQGLDWIGYIKPSTDNTEYNQKFKDKATLTADKSTSTAYMELSSLRSEDTAVYYCARSYGNYHLMDYWGQGTTVTVSS

SEQ ID NO: 545 - protein, 119 aa, Artificial Sequence
  source: /note="Description of Artificial Sequence: Synthetic polypeptide"
  source: /note="Heavy Chain of P3D12 IgG histidine scanning variant #36"
QVQLVQSGAEVKKPGASVKVSCKASGYTFTSYWMHWVKQAPGQGLDWIGYIKPSTDNTEYNQKFKDKATLTADKSTSTAYMELSSLRSEDTAVYYCARSYGNYPHMDYWGQGTTVTVSS

SEQ ID NO: 546 - protein, 119 aa, Artificial Sequence
  source: /note="Description of Artificial Sequence: Synthetic polypeptide"
  source: /note="Heavy Chain of P3D12 IgG histidine scanning variant #37"
QVQLVQSGAEVKKPGASVKVSCKASGYTFTSYWMHWVKQAPGQGLDWIGYIKPSTDNTEYNQKFKDKATLTADKSTSTAYMELSSLRSEDTAVYYCARSYGNYPLHDYWGQGTTVTVSS

SEQ ID NO: 547 - protein, 119 aa, Artificial Sequence
  source: /note="Description of Artificial Sequence: Synthetic polypeptide"
  source: /note="Heavy Chain of P3D12 IgG histidine scanning variant #38"
QVQLVQSGAEVKKPGASVKVSCKASGYTFTSYWMHWVKQAPGQGLDWIGYIKPSTDNTEYNQKFKDKATLTADKSTSTAYMELSSLRSEDTAVYYCARSYGNYPLMHYWGQGTTVTVSS

SEQ ID NO: 548 - protein, 119 aa, Artificial Sequence
  source: /note="Description of Artificial Sequence: Synthetic polypeptide"
  source: /note="Heavy Chain of P3D12 IgG histidine scanning variant #39"
QVQLVQSGAEVKKPGASVKVSCKASGYTFTSYWMHWVKQAPGQGLDWIGYIKPSTDNTEYNQKFKDKATLTADKSTSTAYMELSSLRSEDTAVYYCARSYGNYPLMDHWGQGTTVTVSS

SEQ ID NO: 549 - protein, 108 aa, Artificial Sequence
  source: /note="Description of Artificial Sequence: Synthetic polypeptide"
  source: /note="Light Chain of P3D12 IgG histidine scanning variant #1"
QIVLTQSPAILSLSPGERATLSCHASSSVTSNYLYWYQQKPGSSPKLLIYSTSNLASGVPARFSGSGSGTSYTLTISSLEAEDAASYFCHQWSSYPPTFGSGTKLEIK

SEQ ID NO: 550 - protein, 108 aa, Artificial Sequence
  source: /note="Description of Artificial Sequence: Synthetic polypeptide"
  source: /note="Light Chain of P3D12 IgG histidine scanning variant #2"
QIVLTQSPAILSLSPGERATLSCSHSSSVTSNYLYWYQQKPGSSPKLLIYSTSNLASGVPARFSGSGSGTSYTLTISSLEAEDAASYFCHQWSSYPPTFGSGTKLEIK

SEQ ID NO: 551 - protein, 108 aa, Artificial Sequence
  source: /note="Description of Artificial Sequence: Synthetic polypeptide"
  source: /note="Light Chain of P3D12 IgG histidine scanning variant #3"
QIVLTQSPAILSLSPGERATLSCSAHSSVTSNYLYWYQQKPGSSPKLLIYSTSNLASGVPARFSGSGSGTSYTLTISSLEAEDAASYFCHQWSSYPPTFGSGTKLEIK

SEQ ID NO: 552 - protein, 108 aa, Artificial Sequence
  source: /note="Description of Artificial Sequence: Synthetic polypeptide"
  source: /note="Light Chain of P3D12 IgG histidine scanning variant #4"
QIVLTQSPAILSLSPGERATLSCSASHSVTSNYLYWYQQKPGSSPKLLIYSTSNLASGVPARFSGSGSGTSYTLTISSLEAEDAASYFCHQWSSYPPTFGSGTKLEIK

SEQ ID NO: 553 - protein, 108 aa, Artificial Sequence
  source: /note="Description of Artificial Sequence: Synthetic polypeptide"
  source: /note="Light Chain of P3D12 IgG histidine scanning variant #5"
QIVLTQSPAILSLSPGERATLSCSASSHVTSNYLYWYQQKPGSSPKLLIYSTSNLASGVPARFSGSGSGTSYTLTISSLEAEDAASYFCHQWSSYPPTFGSGTKLEIK

SEQ ID NO: 554 - protein, 108 aa, Artificial Sequence
  source: /note="Description of Artificial Sequence: Synthetic polypeptide"
  source: /note="Light Chain of P3D12 IgG histidine scanning variant #6"
QIVLTQSPAILSLSPGERATLSCSASSSHTSNYLYWYQQKPGSSPKLLIYSTSNLASGVPARFSGSGSGTSYTLTISSLEAEDAASYFCHQWSSYPPTFGSGTKLEIK

SEQ ID NO: 555 - protein, 108 aa, Artificial Sequence
  source: /note="Description of Artificial Sequence: Synthetic polypeptide"
  source: /note="Light Chain of P3D12 IgG histidine scanning variant #7"
QIVLTQSPAILSLSPGERATLSCSASSSVHSNYLYWYQQKPGSSPKLLIYSTSNLASGVPARFSGSGSGTSYTLTISSLEAEDAASYFCHQWSSYPPTFGSGTKLEIK

SEQ ID NO: 556 - protein, 108 aa, Artificial Sequence
  source: /note="Description of Artificial Sequence: Synthetic polypeptide"
  source: /note="Light Chain of P3D12 IgG histidine scanning variant #8"
QIVLTQSPAILSLSPGERATLSCSASSSVTHNYLYWYQQKPGSSPKLLIYSTSNLASGVPARFSGSGSGTSYTLTISSLEAEDAASYFCHQWSSYPPTFGSGTKLEIK

SEQ ID NO: 557 - protein, 108 aa, Artificial Sequence
  source: /note="Description of Artificial Sequence: Synthetic polypeptide"
  source: /note="Light Chain of P3D12 IgG histidine scanning variant #9"
QIVLTQSPAILSLSPGERATLSCSASSSVTSHYLYWYQQKPGSSPKLLIYSTSNLASGVPARFSGSGSGTSYTLTISSLEAEDAASYFCHQWSSYPPTFGSGTKLEIK

SEQ ID NO: 558 - protein, 108 aa, Artificial Sequence
  source: /note="Description of Artificial Sequence: Synthetic polypeptide"
  source: /note="Light Chain of P3D12 IgG histidine scanning variant #10"
QIVLTQSPAILSLSPGERATLSCSASSSVTSNHLYWYQQKPGSSPKLLIYSTSNLASGVPARFSGSGSGTSYTLTISSLEAEDAASYFCHQWSSYPPTFGSGTKLEIK

SEQ ID NO: 559 - protein, 108 aa, Artificial Sequence
  source: /note="Description of Artificial Sequence: Synthetic polypeptide"
  source: /note="Light Chain of P3D12 IgG histidine scanning variant #11"
QIVLTQSPAILSLSPGERATLSCSASSSVTSNYHYWYQQKPGSSPKLLIYSTSNLASGVPARFSGSGSGTSYTLTISSLEAEDAASYFCHQWSSYPPTFGSGTKLEIK

SEQ ID NO: 560 - protein, 108 aa, Artificial Sequence
  source: /note="Description of Artificial Sequence: Synthetic polypeptide"
  source: /note="Light Chain of P3D12 IgG histidine scanning variant #12"
QIVLTQSPAILSLSPGERATLSCSASSSVTSNYLHWYQQKPGSSPKLLIYSTSNLASGVPARFSGSGSGTSYTLTISSLEAEDAASYFCHQWSSYPPTFGSGTKLEIK

SEQ ID NO: 561 - protein, 108 aa, Artificial Sequence
  source: /note="Description of Artificial Sequence: Synthetic polypeptide"
  source: /note="Light Chain of P3D12 IgG histidine scanning variant #13"
QIVLTQSPAILSLSPGERATLSCSASSSVTSNYLYWYQQKPGSSPKLLIYHTSNLASGVPARFSGSGSGTSYTLTISSLEAEDAASYFCHQWSSYPPTFGSGTKLEIK

SEQ ID NO: 562 - protein, 108 aa, Artificial Sequence
  source: /note="Description of Artificial Sequence: Synthetic polypeptide"
  source: /note="Light Chain of P3D12 IgG histidine scanning variant #14"
QIVLTQSPAILSLSPGERATLSCSASSSVTSNYLYWYQQKPGSSPKLLIYSHSNLASGVPARFSGSGSGTSYTLTISSLEAEDAASYFCHQWSSYPPTFGSGTKLEIK

SEQ ID NO: 563 - protein, 108 aa, Artificial Sequence
  source: /note="Description of Artificial Sequence: Synthetic polypeptide"
  source: /note="Light Chain of P3D12 IgG histidine scanning variant #15"
QIVLTQSPAILSLSPGERATLSCSASSSVTSNYLYWYQQKPGSSPKLLIYSTHNLASGVPARFSGSGSGTSYTLTISSLEAEDAASYFCHQWSSYPPTFGSGTKLEIK

SEQ ID NO: 564 - protein, 108 aa, Artificial Sequence
  source: /note="Description of Artificial Sequence: Synthetic polypeptide"
  source: /note="Light Chain of P3D12 IgG histidine scanning variant #16"
QIVLTQSPAILSLSPGERATLSCSASSSVTSNYLYWYQQKPGSSPKLLIYSTSHLASGVPARFSGSGSGTSYTLTISSLEAEDAASYFCHQWSSYPPTFGSGTKLEIK

SEQ ID NO: 565 - protein, 108 aa, Artificial Sequence
  source: /note="Description of Artificial Sequence: Synthetic polypeptide"
  source: /note="Light Chain of P3D12 IgG histidine scanning variant #17"
QIVLTQSPAILSLSPGERATLSCSASSSVTSNYLYWYQQKPGSSPKLLIYSTSNHASGVPARFSGSGSGTSYTLTISSLEAEDAASYFCHQWSSYPPTFGSGTKLEIK

SEQ ID NO: 566 - protein, 108 aa, Artificial Sequence
  source: /note="Description of Artificial Sequence: Synthetic polypeptide"
  source: /note="Light Chain of P3D12 IgG histidine scanning variant #18"
QIVLTQSPAILSLSPGERATLSCSASSSVTSNYLYWYQQKPGSSPKLLIYSTSNLHSGVPARFSGSGSGTSYTLTISSLEAEDAASYFCHQWSSYPPTFGSGTKLEIK

SEQ ID NO: 567 - protein, 108 aa, Artificial Sequence
  source: /note="Description of Artificial Sequence: Synthetic polypeptide"
  source: /note="Light Chain of P3D12 IgG histidine scanning variant #19"
QIVLTQSPAILSLSPGERATLSCSASSSVTSNYLYWYQQKPGSSPKLLIYSTSNLAHGVPARFSGSGSGTSYTLTISSLEAEDAASYFCHQWSSYPPTFGSGTKLEIK

SEQ ID NO: 568 - protein, 108 aa, Artificial Sequence
  source: /note="Description of Artificial Sequence: Synthetic polypeptide"
  source: /note="Light Chain of P3D12 IgG histidine scanning variant #20"
QIVLTQSPAILSLSPGERATLSCSASSSVTSNYLYWYQQKPGSSPKLLIYSTSNLASGVPARFSGSGSGTSYTLTISSLEAEDAASYFCAQWSSYPPTFGSGTKLEIK

SEQ ID NO: 569 - protein, 108 aa, Artificial Sequence
  source: /note="Description of Artificial Sequence: Synthetic polypeptide"
  source: /note="Light Chain of P3D12 IgG histidine scanning variant #21"
QIVLTQSPAILSLSPGERATLSCSASSSVTSNYLYWYQQKPGSSPKLLIYSTSNLASGVPARFSGSGSGTSYTLTISSLEAEDAASYFCHHWSSYPPTFGSGTKLEIK

SEQ ID NO: 570 - protein, 108 aa, Artificial Sequence
  source: /note="Description of Artificial Sequence: Synthetic polypeptide"
  source: /note="Light Chain of P3D12 IgG histidine scanning variant #22"
QIVLTQSPAILSLSPGERATLSCSASSSVTSNYLYWYQQKPGSSPKLLIYSTSNLASGVPARFSGSGSGTSYTLTISSLEAEDAASYFCHQHSSYPPTFGSGTKLEIK

SEQ ID NO: 571 - protein, 108 aa, Artificial Sequence
  source: /note="Description of Artificial Sequence: Synthetic polypeptide"
  source: /note="Light Chain of P3D12 IgG histidine scanning variant #23"
QIVLTQSPAILSLSPGERATLSCSASSSVTSNYLYWYQQKPGSSPKLLIYSTSNLASGVPARFSGSGSGTSYTLTISSLEAEDAASYFCHQWHSYPPTFGSGTKLEIK

SEQ ID NO: 572 - protein, 108 aa, Artificial Sequence
  source: /note="Description of Artificial Sequence: Synthetic polypeptide"
  source: /note="Light Chain of P3D12 IgG histidine scanning variant #24"
QIVLTQSPAILSLSPGERATLSCSASSSVTSNYLYWYQQKPGSSPKLLIYSTSNLASGVPARFSGSGSGTSYTLTISSLEAEDAASYFCHQWSHYPPTFGSGTKLEIK

SEQ ID NO: 573 - protein, 108 aa, Artificial Sequence
  source: /note="Description of Artificial Sequence: Synthetic polypeptide"
  source: /note="Light Chain of P3D12 IgG histidine scanning variant #25"
QIVLTQSPAILSLSPGERATLSCSASSSVTSNYLYWYQQKPGSSPKLLIYSTSNLASGVPARFSGSGSGTSYTLTISSLEAEDAASYFCHQWSSHPPTFGSGTKLEIK

SEQ ID NO: 574 - protein, 108 aa, Artificial Sequence
  source: /note="Description of Artificial Sequence: Synthetic polypeptide"
  source: /note="Light Chain of P3D12 IgG histidine scanning variant #26"
QIVLTQSPAILSLSPGERATLSCSASSSVTSNYLYWYQQKPGSSPKLLIYSTSNLASGVPARFSGSGSGTSYTLTISSLEAEDAASYFCHQWSSYHPTFGSGTKLEIK

SEQ ID NO: 575 - protein, 108 aa, Artificial Sequence
  source: /note="Description of Artificial Sequence: Synthetic polypeptide"
  source: /note="Light Chain of P3D12 IgG histidine scanning variant #27"
QIVLTQSPAILSLSPGERATLSCSASSSVTSNYLYWYQQKPGSSPKLLIYSTSNLASGVPARFSGSGSGTSYTLTISSLEAEDAASYFCHQWSSYPHTFGSGTKLEIK

SEQ ID NO: 576 - protein, 108 aa, Artificial Sequence
  source: /note="Description of Artificial Sequence: Synthetic polypeptide"
  source: /note="Light Chain of P3D12 IgG histidine scanning variant #28"
QIVLTQSPAILSLSPGERATLSCSASSSVTSNYLYWYQQKPGSSPKLLIYSTSNLASGVPARFSGSGSGTSYTLTISSLEAEDAASYFCHQWSSYPPHFGSGTKLEIK

SEQ ID NO: 577 - protein, 119 aa, Artificial Sequence
  source: /note="Description of Artificial Sequence: Synthetic polypeptide"
  source: /note="Heavy Chain Combinations of P3D12 IgG histidine scanning variant #1"
QVQLVQSGAEVKKPGASVKVSCKASGYTHTSYWMHWVKQAPGQGLDWIGHIKPSTDNTEYNQKFKDKATLTADKSTSTAYMELSSLRSEDTAVYYCARSYGNYPLMDYWGQGTTVTVSS

SEQ ID NO: 578 - protein, 119 aa, Artificial Sequence
  source: /note="Description of Artificial Sequence: Synthetic polypeptide"
  source: /note="Heavy Chain Combinations of P3D12 IgG histidine scanning variant #2"
QVQLVQSGAEVKKPGASVKVSCKASGYTHTSYWMHWVKQAPGQGLDWIGYIKPSTDNTHYNQKFKDKATLTADKSTSTAYMELSSLRSEDTAVYYCARSYGNYPLMDYWGQGTTVTVSS

SEQ ID NO: 579 - protein, 119 aa, Artificial Sequence
  source: /note="Description of Artificial Sequence: Synthetic polypeptide"
  source: /note="Heavy Chain Combinations of P3D12 IgG histidine scanning variant #3"
QVQLVQSGAEVKKPGASVKVSCKASGYTHTSYWMHWVKQAPGQGLDWIGYIKPSTDNTEYNQKFKDKATLTADKSTSTAYMELSSLRSEDTAVYYCARSYGHYPLMDYWGQGTTVTVSS

SEQ ID NO: 580 - protein, 119 aa, Artificial Sequence
  source: /note="Description of Artificial Sequence: Synthetic polypeptide"
  source: /note="Heavy Chain Combinations of P3D12 IgG histidine scanning variant #4"
QVQLVQSGAEVKKPGASVKVSCKASGYTHTSYWMHWVKQAPGQGLDWIGYIKPSTDNTEYNQKFKDKATLTADKSTSTAYMELSSLRSEDTAVYYCARSYGNYPLMHYWGQGTTVTVSS

SEQ ID NO: 581 - protein, 119 aa, Artificial Sequence
  source: /note="Description of Artificial Sequence: Synthetic polypeptide"
  source: /note="Heavy Chain Combinations of P3D12 IgG histidine scanning variant #5"
QVQLVQSGAEVKKPGASVKVSCKASGYTFTSYWMHWVKQAPGQGLDWIGHIKPSTDNTHYNQKFKDKATLTADKSTSTAYMELSSLRSEDTAVYYCARSYGNYPLMDYWGQGTTVTVSS

SEQ ID NO: 582 - protein, 119 aa, Artificial Sequence
  source: /note="Description of Artificial Sequence: Synthetic polypeptide"
  source: /note="Heavy Chain Combinations of P3D12 IgG histidine scanning variant #6"
QVQLVQSGAEVKKPGASVKVSCKASGYTFTSYWMHWVKQAPGQGLDWIGHIKPSTDNTEYNQKFKDKATLTADKSTSTAYMELSSLRSEDTAVYYCARSYGHYPLMDYWGQGTTVTVSS

SEQ ID NO: 583 - protein, 119 aa, Artificial Sequence
  source: /note="Description of Artificial Sequence: Synthetic polypeptide"
  source: /note="Heavy Chain Combinations of P3D12 IgG histidine scanning variant #7"
QVQLVQSGAEVKKPGASVKVSCKASGYTFTSYWMHWVKQAPGQGLDWIGHIKPSTDNTEYNQKFKDKATLTADKSTSTAYMELSSLRSEDTAVYYCARSYGNYPLMHYWGQGTTVTVSS

SEQ ID NO: 584 - protein, 119 aa, Artificial Sequence
  source: /note="Description of Artificial Sequence: Synthetic polypeptide"
  source: /note="Heavy Chain Combinations of P3D12 IgG histidine scanning variant #8"
QVQLVQSGAEVKKPGASVKVSCKASGYTFTSYWMHWVKQAPGQGLDWIGYIKPSTDNTHYNQKFKDKATLTADKSTSTAYMELSSLRSEDTAVYYCARSYGHYPLMDYWGQGTTVTVSS

SEQ ID NO: 585 - protein, 119 aa, Artificial Sequence
  source: /note="Description of Artificial Sequence: Synthetic polypeptide"
  source: /note="Heavy Chain Combinations of P3D12 IgG histidine scanning variant #9"
QVQLVQSGAEVKKPGASVKVSCKASGYTFTSYWMHWVKQAPGQGLDWIGYIKPSTDNTHYNQKFKDKATLTADKSTSTAYMELSSLRSEDTAVYYCARSYGNYPLMHYWGQGTTVTVSS

SEQ ID NO: 586 - protein, 119 aa, Artificial Sequence
  source: /note="Description of Artificial Sequence: Synthetic polypeptide"
  source: /note="Heavy Chain Combinations of P3D12 IgG histidine scanning variant #10"
QVQLVQSGAEVKKPGASVKVSCKASGYTFTSYWMHWVKQAPGQGLDWIGYIKPSTDNTEYNQKFKDKATLTADKSTSTAYMELSSLRSEDTAVYYCARSYGHYPLMHYWGQGTTVTVSS

SEQ ID NO: 587 - protein, 119 aa, Artificial Sequence
  source: /note="Description of Artificial Sequence: Synthetic polypeptide"
  source: /note="Heavy Chain Combinations of P3D12 IgG histidine scanning variant #11"
QVQLVQSGAEVKKPGASVKVSCKASGYTHTSYWMHWVKQAPGQGLDWIGHIKPSTDNTHYNQKFKDKATLTADKSTSTAYMELSSLRSEDTAVYYCARSYGNYPLMDYWGQGTTVTVSS

SEQ ID NO: 588 - protein, 119 aa, Artificial Sequence
  source: /note="Description of Artificial Sequence: Synthetic polypeptide"
  source: /note="Heavy Chain Combinations of P3D12 IgG histidine scanning variant #12"
QVQLVQSGAEVKKPGASVKVSCKASGYTHTSYWMHWVKQAPGQGLDWIGHIKPSTDNTEYNQKFKDKATLTADKSTSTAYMELSSLRSEDTAVYYCARSYGHYPLMDYWGQGTTVTVSS

SEQ ID NO: 589 - protein, 119 aa, Artificial Sequence
  source: /note="Description of Artificial Sequence: Synthetic polypeptide"
  source: /note="Heavy Chain Combinations of P3D12 IgG histidine scanning variant #13"
QVQLVQSGAEVKKPGASVKVSCKASGYTHTSYWMHWVKQAPGQGLDWIGHIKPSTDNTEYNQKFKDKATLTADKSTSTAYMELSSLRSEDTAVYYCARSYGNYPLMHYWGQGTTVTVSS

SEQ ID NO: 590 - protein, 119 aa, Artificial Sequence
  source: /note="Description of Artificial Sequence: Synthetic polypeptide"
  source: /note="Heavy Chain Combinations of P3D12 IgG histidine scanning variant #14"
QVQLVQSGAEVKKPGASVKVSCKASGYTHTSYWMHWVKQAPGQGLDWIGYIKPSTDNTHYNQKFKDKATLTADKSTSTAYMELSSLRSEDTAVYYCARSYGHYPLMDYWGQGTTVTVSS

SEQ ID NO: 591 - protein, 119 aa, Artificial Sequence
  source: /note="Description of Artificial Sequence: Synthetic polypeptide"
  source: /note="Heavy Chain Combinations of P3D12 IgG histidine scanning variant #15"
QVQLVQSGAEVKKPGASVKVSCKASGYTHTSYWMHWVKQAPGQGLDWIGYIKPSTDNTHYNQKFKDKATLTADKSTSTAYMELSSLRSEDTAVYYCARSYGNYPLMHYWGQGTTVTVSS

SEQ ID NO: 592 - protein, 119 aa, Artificial Sequence
  source: /note="Description of Artificial Sequence: Synthetic polypeptide"
  source: /note="Heavy Chain Combinations of P3D12 IgG histidine scanning variant #16"
QVQLVQSGAEVKKPGASVKVSCKASGYTHTSYWMHWVKQAPGQGLDWIGYIKPSTDNTEYNQKFKDKATLTADKSTSTAYMELSSLRSEDTAVYYCARSYGHYPLMHYWGQGTTVTVSS

SEQ ID NO: 593 - protein, 119 aa, Artificial Sequence
  source: /note="Description of Artificial Sequence: Synthetic polypeptide"
  source: /note="Heavy Chain Combinations of P3D12 IgG histidine scanning variant #17"
QVQLVQSGAEVKKPGASVKVSCKASGYTFTSYWMHWVKQAPGQGLDWIGHIKPSTDNTHYNQKFKDKATLTADKSTSTAYMELSSLRSEDTAVYYCARSYGHYPLMDYWGQGTTVTVSS

SEQ ID NO: 594 - protein, 119 aa, Artificial Sequence
  source: /note="Description of Artificial Sequence: Synthetic polypeptide"
  source: /note="Heavy Chain Combinations of P3D12 IgG histidine scanning variant #18"
QVQLVQSGAEVKKPGASVKVSCKASGYTFTSYWMHWVKQAPGQGLDWIGHIKPSTDNTHYNQKFKDKATLTADKSTSTAYMELSSLRSEDTAVYYCARSYGNYPLMHYWGQGTTVTVSS

SEQ ID NO: 595 - protein, 119 aa, Artificial Sequence
  source: /note="Description of Artificial Sequence: Synthetic polypeptide"
  source: /note="Heavy Chain Combinations of P3D12 IgG histidine scanning variant #19"
QVQLVQSGAEVKKPGASVKVSCKASGYTFTSYWMHWVKQAPGQGLDWIGHIKPSTDNTEYNQKFKDKATLTADKSTSTAYMELSSLRSEDTAVYYCARSYGHYPLMHYWGQGTTVTVSS

SEQ ID NO: 596 - protein, 119 aa, Artificial Sequence
  source: /note="Description of Artificial Sequence: Synthetic polypeptide"
  source: /note="Heavy Chain Combinations of P3D12 IgG histidine scanning variant #20"
QVQLVQSGAEVKKPGASVKVSCKASGYTFTSYWMHWVKQAPGQGLDWIGYIKPSTDNTHYNQKFKDKATLTADKSTSTAYMELSSLRSEDTAVYYCARSYGHYPLMHYWGQGTTVTVSS

SEQ ID NO: 597 - protein, 119 aa, Artificial Sequence
  source: /note="Description of Artificial Sequence: Synthetic polypeptide"
  source: /note="Heavy Chain Combinations of P3D12 IgG histidine scanning variant #21"
QVQLVQSGAEVKKPGASVKVSCKASGYTHTSYHMHWVKQAPGQGLDWIGYIKPSTDNTEYNQKFKDKATLTADKSTSTAYMELSSLRSEDTAVYYCARSYGNYPLMDYWGQGTTVTVSS

SEQ ID NO: 598 - protein, 119 aa, Artificial Sequence
  source: /note="Description of Artificial Sequence: Synthetic polypeptide"
  source: /note="Heavy Chain Combinations of P3D12 IgG histidine scanning variant #22"
QVQLVQSGAEVKKPGASVKVSCKASGYTFTSYHMHWVKQAPGQGLDWIGHIKPSTDNTEYNQKFKDKATLTADKSTSTAYMELSSLRSEDTAVYYCARSYGNYPLMDYWGQGTTVTVSS

SEQ ID NO: 599 - protein, 119 aa, Artificial Sequence
  source: /note="Description of Artificial Sequence: Synthetic polypeptide"
  source: /note="Heavy Chain Combinations of P3D12 IgG histidine scanning variant #23"
QVQLVQSGAEVKKPGASVKVSCKASGYTFTSYHMHWVKQAPGQGLDWIGYIKPSTDNTHYNQKFKDKATLTADKSTSTAYMELSSLRSEDTAVYYCARSYGNYPLMDYWGQGTTVTVSS

SEQ ID NO: 600 - protein, 119 aa, Artificial Sequence
  source: /note="Description of Artificial Sequence: Synthetic polypeptide"
  source: /note="Heavy Chain Combinations of P3D12 IgG histidine scanning variant #24"
QVQLVQSGAEVKKPGASVKVSCKASGYTFTSYHMHWVKQAPGQGLDWIGYIKPSTDNTEYNQKFKDKATLTADKSTSTAYMELSSLRSEDTAVYYCARSYGHYPLMDYWGQGTTVTVSS

SEQ ID NO: 601 - protein, 119 aa, Artificial Sequence
  source: /note="Description of Artificial Sequence: Synthetic polypeptide"
  source: /note="Heavy Chain Combinations of P3D12 IgG histidine scanning variant #25"
QVQLVQSGAEVKKPGASVKVSCKASGYTFTSYHMHWVKQAPGQGLDWIGYIKPSTDNTEYNQKFKDKATLTADKSTSTAYMELSSLRSEDTAVYYCARSYGNYPLMHYWGQGTTVTVSS

SEQ ID NO: 602 - protein, 119 aa, Artificial Sequence
  source: /note="Description of Artificial Sequence: Synthetic polypeptide"
  source: /note="Heavy Chain Combinations of P3D12 IgG histidine scanning variant #26"
QVQLVQSGAEVKKPGASVKVSCKASGYTHTSYWMAWVKQAPGQGLDWIGYIKPSTDNTEYNQKFKDKATLTADKSTSTAYMELSSLRSEDTAVYYCARSYGNYPLMDYWGQGTTVTVSS

SEQ ID NO: 603 - protein, 119 aa, Artificial Sequence
  source: /note="Description of Artificial Sequence: Synthetic polypeptide"
  source: /note="Heavy Chain Combinations of P3D12 IgG histidine scanning variant #27"
QVQLVQSGAEVKKPGASVKVSCKASGYTFTSYWMAWVKQAPGQGLDWIGHIKPSTDNTEYNQKFKDKATLTADKSTSTAYMELSSLRSEDTAVYYCARSYGNYPLMDYWGQGTTVTVSS

SEQ ID NO: 604 - protein, 119 aa, Artificial Sequence
  source: /note="Description of Artificial Sequence: Synthetic polypeptide"
  source: /note="Heavy Chain Combinations of P3D12 IgG histidine scanning variant #28"
QVQLVQSGAEVKKPGASVKVSCKASGYTFTSYWMAWVKQAPGQGLDWIGYIKPSTDNTHYNQKFKDKATLTADKSTSTAYMELSSLRSEDTAVYYCARSYGNYPLMDYWGQGTTVTVSS

SEQ ID NO: 605 - protein, 119 aa, Artificial Sequence
  source: /note="Description of Artificial Sequence: Synthetic polypeptide"
  source: /note="Heavy Chain Combinations of P3D12 IgG histidine scanning variant #29"
QVQLVQSGAEVKKPGASVKVSCKASGYTFTSYWMAWVKQAPGQGLDWIGYIKPSTDNTEYNQKFKDKATLTADKSTSTAYMELSSLRSEDTAVYYCARSYGHYPLMDYWGQGTTVTVSS

SEQ ID NO: 606 - protein, 119 aa, Artificial Sequence
  source: /note="Description of Artificial Sequence: Synthetic polypeptide"
  source: /note="Heavy Chain Combinations of P3D12 IgG histidine scanning variant #30"
QVQLVQSGAEVKKPGASVKVSCKASGYTFTSYWMAWVKQAPGQGLDWIGYIKPSTDNTEYNQKFKDKATLTADKSTSTAYMELSSLRSEDTAVYYCARSYGNYPLMHYWGQGTTVTVSS

SEQ ID NO: 607 - protein, 119 aa, Artificial Sequence
  source: /note="Description of Artificial Sequence: Synthetic polypeptide"
  source: /note="Heavy Chain Combinations of P3D12 IgG histidine scanning variant #31"
QVQLVQSGAEVKKPGASVKVSCKASGYTHTSYWMHWVKQAPGQGLDWIGYIKPSTDNTEYNQKFKDKATLTADKSTSTAYMELSSLRSEDTAVYYCARSYGNHPLMDYWGQGTTVTVSS

SEQ ID NO: 608 - protein, 119 aa, Artificial Sequence
  source: /note="Description of Artificial Sequence: Synthetic polypeptide"
  source: /note="Heavy Chain Combinations of P3D12 IgG histidine scanning variant #32"
QVQLVQSGAEVKKPGASVKVSCKASGYTFTSYWMHWVKQAPGQGLDWIGHIKPSTDNTEYNQKFKDKATLTADKSTSTAYMELSSLRSEDTAVYYCARSYGNHPLMDYWGQGTTVTVSS

SEQ ID NO: 609 - protein, 119 aa, Artificial Sequence
  source: /note="Description of Artificial Sequence: Synthetic polypeptide"
  source: /note="Heavy Chain Combinations of P3D12 IgG histidine scanning variant #33"
QVQLVQSGAEVKKPGASVKVSCKASGYTFTSYWMHWVKQAPGQGLDWIGYIKPSTDNTHYNQKFKDKATLTADKSTSTAYMELSSLRSEDTAVYYCARSYGNHPLMDYWGQGTTVTVSS

SEQ ID NO: 610 - protein, 119 aa, Artificial Sequence
  source: /note="Description of Artificial Sequence: Synthetic polypeptide"
  source: /note="Heavy Chain Combinations of P3D12 IgG histidine scanning variant #34"
QVQLVQSGAEVKKPGASVKVSCKASGYTFTSYWMHWVKQAPGQGLDWIGYIKPSTDNTEYNQKFKDKATLTADKSTSTAYMELSSLRSEDTAVYYCARSYGHHPLMDYWGQGTTVTVSS

SEQ ID NO: 611 - protein, 119 aa, Artificial Sequence
  source: /note="Description of Artificial Sequence: Synthetic polypeptide"
  source: /note="Heavy Chain Combinations of P3D12 IgG histidine scanning variant #35"
QVQLVQSGAEVKKPGASVKVSCKASGYTFTSYWMHWVKQAPGQGLDWIGYIKPSTDNTEYNQKFKDKATLTADKSTSTAYMELSSLRSEDTAVYYCARSYGNHPLMHYWGQGTTVTVSS

SEQ ID NO: 612 - protein, 119 aa, Artificial Sequence
  source: /note="Description of Artificial Sequence: Synthetic polypeptide"
  source: /note="Heavy Chain Combinations of P3D12 IgG histidine scanning variant #36"
QVQLVQSGAEVKKPGASVKVSCKASGYTHTSYWMHWVKQAPGQGLDWIGYIKPSTDNTEYNQKFKDKATLTADKSTSTAYMELSSLRSEDTAVYYCARSYGNYPLHDYWGQGTTVTVSS

SEQ ID NO: 613 - protein, 119 aa, Artificial Sequence
  source: /note="Description of Artificial Sequence: Synthetic polypeptide"
  source: /note="Heavy Chain Combinations of P3D12 IgG histidine scanning variant #37"
QVQLVQSGAEVKKPGASVKVSCKASGYTFTSYWMHWVKQAPGQGLDWIGHIKPSTDNTEYNQKFKDKATLTADKSTSTAYMELSSLRSEDTAVYYCARSYGNYPLHDYWGQGTTVTVSS

SEQ ID NO: 614 - protein, 119 aa, Artificial Sequence
  source: /note="Description of Artificial Sequence: Synthetic polypeptide"
  source: /note="Heavy Chain Combinations of P3D12 IgG histidine scanning variant #38"
QVQLVQSGAEVKKPGASVKVSCKASGYTFTSYWMHWVKQAPGQGLDWIGYIKPSTDNTHYNQKFKDKATLTADKSTSTAYMELSSLRSEDTAVYYCARSYGNYPLHDYWGQGTTVTVSS

SEQ ID NO: 615 - protein, 119 aa, Artificial Sequence
  source: /note="Description of Artificial Sequence: Synthetic polypeptide"
  source: /note="Heavy Chain Combinations of P3D12 IgG histidine scanning variant #39"
QVQLVQSGAEVKKPGASVKVSCKASGYTFTSYWMHWVKQAPGQGLDWIGYIKPSTDNTEYNQKFKDKATLTADKSTSTAYMELSSLRSEDTAVYYCARSYGHYPLHDYWGQGTTVTVSS

SEQ ID NO: 616 - protein, 119 aa, Artificial Sequence
  source: /note="Description of Artificial Sequence: Synthetic polypeptide"
  source: /note="Heavy Chain Combinations of P3D12 IgG histidine scanning variant #40"
QVQLVQSGAEVKKPGASVKVSCKASGYTFTSYWMHWVKQAPGQGLDWIGYIKPSTDNTEYNQKFKDKATLTADKSTSTAYMELSSLRSEDTAVYYCARSYGNYPLHHYWGQGTTVTVSS

SEQ ID NO: 617 - protein, 119 aa, Artificial Sequence
  source: /note="Description of Artificial Sequence: Synthetic polypeptide"
  source: /note="Heavy Chain Combinations of P3D12 IgG histidine scanning variant #41"
QVQLVQSGAEVKKPGASVKVSCKASGYTFTSYHMAWVKQAPGQGLDWIGYIKPSTDNTEYNQKFKDKATLTADKSTSTAYMELSSLRSEDTAVYYCARSYGNYPLMDYWGQGTTVTVSS

SEQ ID NO: 618 - protein, 119 aa, Artificial Sequence
  source: /note="Description of Artificial Sequence: Synthetic polypeptide"
  source: /note="Heavy Chain Combinations of P3D12 IgG histidine scanning variant #42"
QVQLVQSGAEVKKPGASVKVSCKASGYTFTSYHMHWVKQAPGQGLDWIGYIKPSTDNTEYNQKFKDKATLTADKSTSTAYMELSSLRSEDTAVYYCARSYGNHPLMDYWGQGTTVTVSS

SEQ ID NO: 619 - protein, 119 aa, Artificial Sequence
  source: /note="Description of Artificial Sequence: Synthetic polypeptide"
  source: /note="Heavy Chain Combinations of P3D12 IgG histidine scanning variant #43"
QVQLVQSGAEVKKPGASVKVSCKASGYTFTSYHMHWVKQAPGQGLDWIGYIKPSTDNTEYNQKFKDKATLTADKSTSTAYMELSSLRSEDTAVYYCARSYGNYPLHDYWGQGTTVTVSS

SEQ ID NO: 620 - protein, 119 aa, Artificial Sequence
  source: /note="Description of Artificial Sequence: Synthetic polypeptide"
  source: /note="Heavy Chain Combinations of P3D12 IgG histidine scanning variant #44"
QVQLVQSGAEVKKPGASVKVSCKASGYTFTSYWMAWVKQAPGQGLDWIGYIKPSTDNTEYNQKFKDKATLTADKSTSTAYMELSSLRSEDTAVYYCARSYGNHPLMDYWGQGTTVTVSS

SEQ ID NO: 621 - protein, 119 aa, Artificial Sequence
  source: /note="Description of Artificial Sequence: Synthetic polypeptide"
  source: /note="Heavy Chain Combinations of P3D12 IgG histidine scanning variant #45"
QVQLVQSGAEVKKPGASVKVSCKASGYTFTSYWMAWVKQAPGQGLDWIGYIKPSTDNTEYNQKFKDKATLTADKSTSTAYMELSSLRSEDTAVYYCARSYGNYPLHDYWGQGTTVTVSS

SEQ ID NO: 622 - protein, 119 aa, Artificial Sequence
  source: /note="Description of Artificial Sequence: Synthetic polypeptide"
  source: /note="Heavy Chain Combinations of P3D12 IgG histidine scanning variant #46"
QVQLVQSGAEVKKPGASVKVSCKASGYTFTSYWMHWVKQAPGQGLDWIGYIKPSTDNTEYNQKFKDKATLTADKSTSTAYMELSSLRSEDTAVYYCARSYGNHPLHDYWGQGTTVTVSS

SEQ ID NO: 623 - protein, 119 aa, Artificial Sequence
  source: /note="Description of Artificial Sequence: Synthetic polypeptide"
  source: /note="Heavy Chain Combinations of P3D12 IgG histidine scanning variant #47"
QVQLVQSGAEVKKPGASVKVSCKASGYTFTSYHMAWVKQAPGQGLDWIGYIKPSTDNTEYNQKFKDKATLTADKSTSTAYMELSSLRSEDTAVYYCARSYGNHPLMDYWGQGTTVTVSS

SEQ ID NO: 624 - protein, 119 aa, Artificial Sequence
  source: /note="Description of Artificial Sequence: Synthetic polypeptide"
  source: /note="Heavy Chain Combinations of P3D12 IgG histidine scanning variant #48"
QVQLVQSGAEVKKPGASVKVSCKASGYTFTSYHMAWVKQAPGQGLDWIGYIKPSTDNTEYNQKFKDKATLTADKSTSTAYMELSSLRSEDTAVYYCARSYGNYPLHDYWGQGTTVTVSS

SEQ ID NO: 625 - protein, 119 aa, Artificial Sequence
  source: /note="Description of Artificial Sequence: Synthetic polypeptide"
  source: /note="Heavy Chain Combinations of P3D12 IgG histidine scanning variant #49"
QVQLVQSGAEVKKPGASVKVSCKASGYTFTSYHMHWVKQAPGQGLDWIGYIKPSTDNTEYNQKFKDKATLTADKSTSTAYMELSSLRSEDTAVYYCARSYGNHPLHDYWGQGTTVTVSS

SEQ ID NO: 626 - protein, 119 aa, Artificial Sequence
  source: /note="Description of Artificial Sequence: Synthetic polypeptide"
  source: /note="Heavy Chain Combinations of P3D12 IgG histidine scanning variant #50"
QVQLVQSGAEVKKPGASVKVSCKASGYTFTSYWMAWVKQAPGQGLDWIGYIKPSTDNTEYNQKFKDKATLTADKSTSTAYMELSSLRSEDTAVYYCARSYGNHPLHDYWGQGTTVTVSS

SEQ ID NO: 627 - protein, 119 aa, Artificial Sequence
  source: /note="Description of Artificial Sequence: Synthetic polypeptide"
  source: /note="Heavy Chain Combinations of P3D12 IgG histidine scanning variant #51"
QVQLVQSGAEVKKPGASVKVSCKASGYTHTSYHMAWVKQAPGQGLDWIGYIKPSTDNTEYNQKFKDKATLTADKSTSTAYMELSSLRSEDTAVYYCARSYGNYPLMDYWGQGTTVTVSS

SEQ ID NO: 628 - protein, 119 aa, Artificial Sequence
  source: /note="Description of Artificial Sequence: Synthetic polypeptide"
  source: /note="Heavy Chain Combinations of P3D12 IgG histidine scanning variant #52"
QVQLVQSGAEVKKPGASVKVSCKASGYTHTSYHMHWVKQAPGQGLDWIGYIKPSTDNTEYNQKFKDKATLTADKSTSTAYMELSSLRSEDTAVYYCARSYGNHPLMDYWGQGTTVTVSS

SEQ ID NO: 629 - protein, 119 aa, Artificial Sequence
  source: /note="Description of Artificial Sequence: Synthetic polypeptide"
  source: /note="Heavy Chain Combinations of P3D12 IgG histidine scanning variant #53"
QVQLVQSGAEVKKPGASVKVSCKASGYTHTSYHMHWVKQAPGQGLDWIGYIKPSTDNTEYNQKFKDKATLTADKSTSTAYMELSSLRSEDTAVYYCARSYGNYPLHDYWGQGTTVTVSS

SEQ ID NO: 630 - protein, 119 aa, Artificial Sequence
  source: /note="Description of Artificial Sequence: Synthetic polypeptide"
  source: /note="Heavy Chain Combinations of P3D12 IgG histidine scanning variant #54"
QVQLVQSGAEVKKPGASVKVSCKASGYTHTSYWMAWVKQAPGQGLDWIGYIKPSTDNTEYNQKFKDKATLTADKSTSTAYMELSSLRSEDTAVYYCARSYGNHPLMDYWGQGTTVTVSS

SEQ ID NO: 631 - protein, 119 aa, Artificial Sequence
  source: /note="Description of Artificial Sequence: Synthetic polypeptide"
  source: /note="Heavy Chain Combinations of P3D12 IgG histidine scanning variant #55"
QVQLVQSGAEVKKPGASVKVSCKASGYTHTSYWMAWVKQAPGQGLDWIGYIKPSTDNTEYNQKFKDKATLTADKSTSTAYMELSSLRSEDTAVYYCARSYGNYPLHDYWGQGTTVTVSS

SEQ ID NO: 632 - protein, 119 aa, Artificial Sequence
  source: /note="Description of Artificial Sequence: Synthetic polypeptide"
  source: /note="Heavy Chain Combinations of P3D12 IgG histidine scanning variant #56"
QVQLVQSGAEVKKPGASVKVSCKASGYTHTSYWMHWVKQAPGQGLDWIGYIKPSTDNTEYNQKFKDKATLTADKSTSTAYMELSSLRSEDTAVYYCARSYGNHPLHDYWGQGTTVTVSS

SEQ ID NO: 633 - protein, 119 aa, Artificial Sequence
  source: /note="Description of Artificial Sequence: Synthetic polypeptide"
  source: /note="Heavy Chain Combinations of P3D12 IgG histidine scanning variant #57"
QVQLVQSGAEVKKPGASVKVSCKASGYTFTSYHMAWVKQAPGQGLDWIGHIKPSTDNTEYNQKFKDKATLTADKSTSTAYMELSSLRSEDTAVYYCARSYGNYPLMDYWGQGTTVTVSS

SEQ ID NO: 634 - protein, 119 aa, Artificial Sequence
  source: /note="Description of Artificial Sequence: Synthetic polypeptide"
  source: /note="Heavy Chain Combinations of P3D12 IgG histidine scanning variant #58"
QVQLVQSGAEVKKPGASVKVSCKASGYTFTSYHMHWVKQAPGQGLDWIGHIKPSTDNTEYNQKFKDKATLTADKSTSTAYMELSSLRSEDTAVYYCARSYGNHPLMDYWGQGTTVTVSS

SEQ ID NO: 635 - protein, 119 aa, Artificial Sequence
  source: /note="Description of Artificial Sequence: Synthetic polypeptide"
  source: /note="Heavy Chain Combinations of P3D12 IgG histidine scanning variant #59"
QVQLVQSGAEVKKPGASVKVSCKASGYTFTSYHMHWVKQAPGQGLDWIGHIKPSTDNTEYNQKFKDKATLTADKSTSTAYMELSSLRSEDTAVYYCARSYGNYPLHDYWGQGTTVTVSS

SEQ ID NO: 636 - protein, 119 aa, Artificial Sequence
  source: /note="Description of Artificial Sequence: Synthetic polypeptide"
  source: /note="Heavy Chain Combinations of P3D12 IgG histidine scanning variant #60"
QVQLVQSGAEVKKPGASVKVSCKASGYTFTSYWMAWVKQAPGQGLDWIGHIKPSTDNTEYNQKFKDKATLTADKSTSTAYMELSSLRSEDTAVYYCARSYGNHPLMDYWGQGTTVTVSS

SEQ ID NO: 637 - protein, 119 aa, Artificial Sequence
  source: /note="Description of Artificial Sequence: Synthetic polypeptide"
  source: /note="Heavy Chain Combinations of P3D12 IgG histidine scanning variant #61"
QVQLVQSGAEVKKPGASVKVSCKASGYTFTSYWMAWVKQAPGQGLDWIGHIKPSTDNTEYNQKFKDKATLTADKSTSTAYMELSSLRSEDTAVYYCARSYGNYPLHDYWGQGTTVTVSS

SEQ ID NO: 638 - protein, 119 aa, Artificial Sequence
  source: /note="Description of Artificial Sequence: Synthetic polypeptide"
  source: /note="Heavy Chain Combinations of P3D12 IgG histidine scanning variant #62"
QVQLVQSGAEVKKPGASVKVSCKASGYTFTSYWMHWVKQAPGQGLDWIGHIKPSTDNTEYNQKFKDKATLTADKSTSTAYMELSSLRSEDTAVYYCARSYGNHPLHDYWGQGTTVTVSS

SEQ ID NO: 639 - protein, 119 aa, Artificial Sequence
  source: /note="Description of Artificial Sequence: Synthetic polypeptide"
  source: /note="Heavy Chain Combinations of P3D12 IgG histidine scanning variant #63"
QVQLVQSGAEVKKPGASVKVSCKASGYTFTSYHMAWVKQAPGQGLDWIGYIKPSTDNTHYNQKFKDKATLTADKSTSTAYMELSSLRSEDTAVYYCARSYGNYPLMDYWGQGTTVTVSS

SEQ ID NO: 640 - protein, 119 aa, Artificial Sequence
  source: /note="Description of Artificial Sequence: Synthetic polypeptide"
  source: /note="Heavy Chain Combinations of P3D12 IgG histidine scanning variant #64"
QVQLVQSGAEVKKPGASVKVSCKASGYTFTSYHMHWVKQAPGQGLDWIGYIKPSTDNTHYNQKFKDKATLTADKSTSTAYMELSSLRSEDTAVYYCARSYGNHPLMDYWGQGTTVTVSS

SEQ ID NO: 641 - protein, 119 aa, Artificial Sequence
  source: /note="Description of Artificial Sequence: Synthetic polypeptide"
  source: /note="Heavy Chain Combinations of P3D12 IgG histidine scanning variant #65"
QVQLVQSGAEVKKPGASVKVSCKASGYTFTSYHMHWVKQAPGQGLDWIGYIKPSTDNTHYNQKFKDKATLTADKSTSTAYMELSSLRSEDTAVYYCARSYGNYPLHDYWGQGTTVTVSS

SEQ ID NO: 642 - protein, 119 aa, Artificial Sequence
  source: /note="Description of Artificial Sequence: Synthetic polypeptide"
  source: /note="Heavy Chain Combinations of P3D12 IgG histidine scanning variant #66"
QVQLVQSGAEVKKPGASVKVSCKASGYTFTSYWMAWVKQAPGQGLDWIGYIKPSTDNTHYNQKFKDKATLTADKSTSTAYMELSSLRSEDTAVYYCARSYGNHPLMDYWGQGTTVTVSS

SEQ ID NO: 643 - protein, 119 aa, Artificial Sequence
  source: /note="Description of Artificial Sequence: Synthetic polypeptide"
  source: /note="Heavy Chain Combinations of P3D12 IgG histidine scanning variant #67"
QVQLVQSGAEVKKPGASVKVSCKASGYTFTSYWMAWVKQAPGQGLDWIGYIKPSTDNTHYNQKFKDKATLTADKSTSTAYMELSSLRSEDTAVYYCARSYGNYPLHDYWGQGTTVTVSS

SEQ ID NO: 644 - protein, 119 aa, Artificial Sequence
  source: /note="Description of Artificial Sequence: Synthetic polypeptide"
  source: /note="Heavy Chain Combinations of P3D12 IgG histidine scanning variant #68"
QVQLVQSGAEVKKPGASVKVSCKASGYTFTSYWMHWVKQAPGQGLDWIGYIKPSTDNTHYNQKFKDKATLTADKSTSTAYMELSSLRSEDTAVYYCARSYGNHPLHDYWGQGTTVTVSS

SEQ ID NO: 645 - protein, 119 aa, Artificial Sequence
  source: /note="Description of Artificial Sequence: Synthetic polypeptide"
  source: /note="Heavy Chain Combinations of P3D12 IgG histidine scanning variant #69"
QVQLVQSGAEVKKPGASVKVSCKASGYTFTSYHMAWVKQAPGQGLDWIGYIKPSTDNTEYNQKFKDKATLTADKSTSTAYMELSSLRSEDTAVYYCARSYGHYPLMDYWGQGTTVTVSS

SEQ ID NO: 646 - protein, 119 aa, Artificial Sequence
  source: /note="Description of Artificial Sequence: Synthetic polypeptide"
  source: /note="Heavy Chain Combinations of P3D12 IgG histidine scanning variant #70"
QVQLVQSGAEVKKPGASVKVSCKASGYTFTSYHMHWVKQAPGQGLDWIGYIKPSTDNTEYNQKFKDKATLTADKSTSTAYMELSSLRSEDTAVYYCARSYGHHPLMDYWGQGTTVTVSS

SEQ ID NO: 647 - protein, 119 aa, Artificial Sequence
  source: /note="Description of Artificial Sequence: Synthetic polypeptide"
  source: /note="Heavy Chain Combinations of P3D12 IgG histidine scanning variant #71"
QVQLVQSGAEVKKPGASVKVSCKASGYTFTSYHMHWVKQAPGQGLDWIGYIKPSTDNTEYNQKFKDKATLTADKSTSTAYMELSSLRSEDTAVYYCARSYGHYPLHDYWGQGTTVTVSS

SEQ ID NO: 648 - protein, 119 aa, Artificial Sequence
  source: /note="Description of Artificial Sequence: Synthetic polypeptide"
  source: /note="Heavy Chain Combinations of P3D12 IgG histidine scanning variant #72"
QVQLVQSGAEVKKPGASVKVSCKASGYTFTSYWMAWVKQAPGQGLDWIGYIKPSTDNTEYNQKFKDKATLTADKSTSTAYMELSSLRSEDTAVYYCARSYGHHPLMDYWGQGTTVTVSS

SEQ ID NO: 649 - protein, 119 aa, Artificial Sequence
  source: /note="Description of Artificial Sequence: Synthetic polypeptide"
  source: /note="Heavy Chain Combinations of P3D12 IgG histidine scanning variant #73"
QVQLVQSGAEVKKPGASVKVSCKASGYTFTSYWMAWVKQAPGQGLDWIGYIKPSTDNTEYNQKFKDKATLTADKSTSTAYMELSSLRSEDTAVYYCARSYGHYPLHDYWGQGTTVTVSS

SEQ ID NO: 650 - protein, 119 aa, Artificial Sequence
  source: /note="Description of Artificial Sequence: Synthetic polypeptide"
  source: /note="Heavy Chain Combinations of P3D12 IgG histidine scanning variant #74"
QVQLVQSGAEVKKPGASVKVSCKASGYTFTSYWMHWVKQAPGQGLDWIGYIKPSTDNTEYNQKFKDKATLTADKSTSTAYMELSSLRSEDTAVYYCARSYGHHPLHDYWGQGTTVTVSS

SEQ ID NO: 651 - protein, 119 aa, Artificial Sequence
  source: /note="Description of Artificial Sequence: Synthetic polypeptide"
  source: /note="Heavy Chain Combinations of P3D12 IgG histidine scanning variant #75"
QVQLVQSGAEVKKPGASVKVSCKASGYTFTSYHMAWVKQAPGQGLDWIGYIKPSTDNTEYNQKFKDKATLTADKSTSTAYMELSSLRSEDTAVYYCARSYGNYPLMHYWGQGTTVTVSS

SEQ ID NO: 652 - protein, 119 aa, Artificial Sequence
  source: /note="Description of Artificial Sequence: Synthetic polypeptide"
  source: /note="Heavy Chain Combinations of P3D12 IgG histidine scanning variant #76"
QVQLVQSGAEVKKPGASVKVSCKASGYTFTSYHMHWVKQAPGQGLDWIGYIKPSTDNTEYNQKFKDKATLTADKSTSTAYMELSSLRSEDTAVYYCARSYGNHPLMHYWGQGTTVTVSS

SEQ ID NO: 653 - protein, 119 aa, Artificial Sequence
  source: /note="Description of Artificial Sequence: Synthetic polypeptide"
  source: /note="Heavy Chain Combinations of P3D12 IgG histidine scanning variant #77"
QVQLVQSGAEVKKPGASVKVSCKASGYTFTSYHMHWVKQAPGQGLDWIGYIKPSTDNTEYNQKFKDKATLTADKSTSTAYMELSSLRSEDTAVYYCARSYGNYPLHHYWGQGTTVTVSS

SEQ ID NO: 654 - protein, 119 aa, Artificial Sequence
  source: /note="Description of Artificial Sequence: Synthetic polypeptide"
  source: /note="Heavy Chain Combinations of P3D12 IgG histidine scanning variant #78"
QVQLVQSGAEVKKPGASVKVSCKASGYTFTSYWMAWVKQAPGQGLDWIGYIKPSTDNTEYNQKFKDKATLTADKSTSTAYMELSSLRSEDTAVYYCARSYGNHPLMHYWGQGTTVTVSS

SEQ ID NO: 655 - protein, 119 aa, Artificial Sequence
  source: /note="Description of Artificial Sequence: Synthetic polypeptide"
  source: /note="Heavy Chain Combinations of P3D12 IgG histidine scanning variant #79"
QVQLVQSGAEVKKPGASVKVSCKASGYTFTSYWMAWVKQAPGQGLDWIGYIKPSTDNTEYNQKFKDKATLTADKSTSTAYMELSSLRSEDTAVYYCARSYGNYPLHHYWGQGTTVTVSS

SEQ ID NO: 656 - protein, 119 aa, Artificial Sequence
  source: /note="Description of Artificial Sequence: Synthetic polypeptide"
  source: /note="Heavy Chain Combinations of P3D12 IgG histidine scanning variant #80"
QVQLVQSGAEVKKPGASVKVSCKASGYTFTSYWMHWVKQAPGQGLDWIGYIKPSTDNTEYNQKFKDKATLTADKSTSTAYMELSSLRSEDTAVYYCARSYGNHPLHHYWGQGTTVTVSS

SEQ ID NO: 657 - protein, 119 aa, Artificial Sequence
  source: /note="Description of Artificial Sequence: Synthetic polypeptide"
  source: /note="Heavy Chain Combinations of P3D12 IgG histidine scanning variant #81"
QVQLVQSGAEVKKPGASVKVSCKASGYTHTSYHMHWVKQAPGQGLDWIGHIKPSTDNTEYNQKFKDKATLTADKSTSTAYMELSSLRSEDTAVYYCARSYGNYPLMDYWGQGTTVTVSS

SEQ ID NO: 658 - protein, 119 aa, Artificial Sequence
  source: /note="Description of Artificial Sequence: Synthetic polypeptide"
  source: /note="Heavy Chain Combinations of P3D12 IgG histidine scanning variant #82"
QVQLVQSGAEVKKPGASVKVSCKASGYTHTSYHMHWVKQAPGQGLDWIGYIKPSTDNTHYNQKFKDKATLTADKSTSTAYMELSSLRSEDTAVYYCARSYGNYPLMDYWGQGTTVTVSS

SEQ ID NO: 659 - protein, 119 aa, Artificial Sequence
  source: /note="Description of Artificial Sequence: Synthetic polypeptide"
  source: /note="Heavy Chain Combinations of P3D12 IgG histidine scanning variant #83"
QVQLVQSGAEVKKPGASVKVSCKASGYTHTSYHMHWVKQAPGQGLDWIGYIKPSTDNTEYNQKFKDKATLTADKSTSTAYMELSSLRSEDTAVYYCARSYGHYPLMDYWGQGTTVTVSS

SEQ ID NO: 660 - protein, 119 aa, Artificial Sequence
  source: /note="Description of Artificial Sequence: Synthetic polypeptide"
  source: /note="Heavy Chain Combinations of P3D12 IgG histidine scanning variant #84"
QVQLVQSGAEVKKPGASVKVSCKASGYTHTSYHMHWVKQAPGQGLDWIGYIKPSTDNTEYNQKFKDKATLTADKSTSTAYMELSSLRSEDTAVYYCARSYGNYPLMHYWGQGTTVTVSS

SEQ ID NO: 661 - protein, 119 aa, Artificial Sequence
  source: /note="Description of Artificial Sequence: Synthetic polypeptide"
  source: /note="Heavy Chain Combinations of P3D12 IgG histidine scanning variant #85"
QVQLVQSGAEVKKPGASVKVSCKASGYTFTSYHMHWVKQAPGQGLDWIGHIKPSTDNTHYNQKFKDKATLTADKSTSTAYMELSSLRSEDTAVYYCARSYGNYPLMDYWGQGTTVTVSS

SEQ ID NO: 662 - protein, 119 aa, Artificial Sequence
  source: /note="Description of Artificial Sequence: Synthetic polypeptide"
  source: /note="Heavy Chain Combinations of P3D12 IgG histidine scanning variant #86"
QVQLVQSGAEVKKPGASVKVSCKASGYTFTSYHMHWVKQAPGQGLDWIGHIKPSTDNTEYNQKFKDKATLTADKSTSTAYMELSSLRSEDTAVYYCARSYGHYPLMDYWGQGTTVTVSS

SEQ ID NO: 663 - protein, 119 aa, Artificial Sequence
  source: /note="Description of Artificial Sequence: Synthetic polypeptide"
  source: /note="Heavy Chain Combinations of P3D12 IgG histidine scanning variant #87"
QVQLVQSGAEVKKPGASVKVSCKASGYTFTSYHMHWVKQAPGQGLDWIGHIKPSTDNTEYNQKFKDKATLTADKSTSTAYMELSSLRSEDTAVYYCARSYGNYPLMHYWGQGTTVTVSS

SEQ ID NO: 664 - protein, 119 aa, Artificial Sequence
  source: /note="Description of Artificial Sequence: Synthetic polypeptide"
  source: /note="Heavy Chain Combinations of P3D12 IgG histidine scanning variant #88"
QVQLVQSGAEVKKPGASVKVSCKASGYTFTSYHMHWVKQAPGQGLDWIGYIKPSTDNTHYNQKFKDKATLTADKSTSTAYMELSSLRSEDTAVYYCARSYGHYPLMDYWGQGTTVTVSS

SEQ ID NO: 665 - protein, 119 aa, Artificial Sequence
  source: /note="Description of Artificial Sequence: Synthetic polypeptide"
  source: /note="Heavy Chain Combinations of P3D12 IgG histidine scanning variant #89"
QVQLVQSGAEVKKPGASVKVSCKASGYTFTSYHMHWVKQAPGQGLDWIGYIKPSTDNTHYNQKFKDKATLTADKSTSTAYMELSSLRSEDTAVYYCARSYGNYPLMHYWGQGTTVTVSS

SEQ ID NO: 666 - protein, 119 aa, Artificial Sequence
  source: /note="Description of Artificial Sequence: Synthetic polypeptide"
  source: /note="Heavy Chain Combinations of P3D12 IgG histidine scanning variant #90"
QVQLVQSGAEVKKPGASVKVSCKASGYTFTSYHMHWVKQAPGQGLDWIGYIKPSTDNTEYNQKFKDKATLTADKSTSTAYMELSSLRSEDTAVYYCARSYGHYPLMHYWGQGTTVTVSS

SEQ ID NO: 667 - protein, 119 aa, Artificial Sequence
  source: /note="Description of Artificial Sequence: Synthetic polypeptide"
  source: /note="Heavy Chain Combinations of P3D12 IgG histidine scanning variant #91"
QVQLVQSGAEVKKPGASVKVSCKASGYTHTSYWMAWVKQAPGQGLDWIGHIKPSTDNTEYNQKFKDKATLTADKSTSTAYMELSSLRSEDTAVYYCARSYGNYPLMDYWGQGTTVTVSS

SEQ ID NO: 668 - protein, 119 aa, Artificial Sequence
  source: /note="Description of Artificial Sequence: Synthetic polypeptide"
  source: /note="Heavy Chain Combinations of P3D12 IgG histidine scanning variant #92"
QVQLVQSGAEVKKPGASVKVSCKASGYTHTSYWMAWVKQAPGQGLDWIGYIKPSTDNTHYNQKFKDKATLTADKSTSTAYMELSSLRSEDTAVYYCARSYGNYPLMDYWGQGTTVTVSS

SEQ ID NO: 669 - protein, 119 aa, Artificial Sequence
  source: /note="Description of Artificial Sequence: Synthetic polypeptide"
  source: /note="Heavy Chain Combinations of P3D12 IgG histidine scanning variant #93"
QVQLVQSGAEVKKPGASVKVSCKASGYTHTSYWMAWVKQAPGQGLDWIGYIKPSTDNTEYNQKFKDKATLTADKSTSTAYMELSSLRSEDTAVYYCARSYGHYPLMDYWGQGTTVTVSS

SEQ ID NO: 670 - protein, 119 aa, Artificial Sequence
  source: /note="Description of Artificial Sequence: Synthetic polypeptide"
  source: /note="Heavy Chain Combinations of P3D12 IgG histidine scanning variant #94"
QVQLVQSGAEVKKPGASVKVSCKASGYTHTSYWMAWVKQAPGQGLDWIGYIKPSTDNTEYNQKFKDKATLTADKSTSTAYMELSSLRSEDTAVYYCARSYGNYPLMHYWGQGTTVTVSS

SEQ ID NO: 671 - protein, 119 aa, Artificial Sequence
  source: /note="Description of Artificial Sequence: Synthetic polypeptide"
  source: /note="Heavy Chain Combinations of P3D12 IgG histidine scanning variant #95"
QVQLVQSGAEVKKPGASVKVSCKASGYTFTSYWMAWVKQAPGQGLDWIGHIKPSTDNTHYNQKFKDKATLTADKSTSTAYMELSSLRSEDTAVYYCARSYGNYPLMDYWGQGTTVTVSS

SEQ ID NO: 672 - protein, 119 aa, Artificial Sequence
  source: /note="Description of Artificial Sequence: Synthetic polypeptide"
  source: /note="Heavy Chain Combinations of P3D12 IgG histidine scanning variant #96"
QVQLVQSGAEVKKPGASVKVSCKASGYTFTSYWMAWVKQAPGQGLDWIGHIKPSTDNTEYNQKFKDKATLTADKSTSTAYMELSSLRSEDTAVYYCARSYGHYPLMDYWGQGTTVTVSS

SEQ ID NO: 673 - protein, 119 aa, Artificial Sequence
  source: /note="Description of Artificial Sequence: Synthetic polypeptide"
  source: /note="Heavy Chain Combinations of P3D12 IgG histidine scanning variant #97"
QVQLVQSGAEVKKPGASVKVSCKASGYTFTSYWMAWVKQAPGQGLDWIGHIKPSTDNTEYNQKFKDKATLTADKSTSTAYMELSSLRSEDTAVYYCARSYGNYPLMHYWGQGTTVTVSS

SEQ ID NO: 674 - protein, 119 aa, Artificial Sequence
  source: /note="Description of Artificial Sequence: Synthetic polypeptide"
  source: /note="Heavy Chain Combinations of P3D12 IgG histidine scanning variant #98"
QVQLVQSGAEVKKPGASVKVSCKASGYTFTSYWMAWVKQAPGQGLDWIGYIKPSTDNTHYNQKFKDKATLTADKSTSTAYMELSSLRSEDTAVYYCARSYGHYPLMDYWGQGTTVTVSS

SEQ ID NO: 675 - protein, 119 aa, Artificial Sequence
  source: /note="Description of Artificial Sequence: Synthetic polypeptide"
  source: /note="Heavy Chain Combinations of P3D12 IgG histidine scanning variant #99"
QVQLVQSGAEVKKPGASVKVSCKASGYTFTSYWMAWVKQAPGQGLDWIGYIKPSTDNTHYNQKFKDKATLTADKSTSTAYMELSSLRSEDTAVYYCARSYGNYPLMHYWGQGTTVTVSS

SEQ ID NO: 676 - protein, 119 aa, Artificial Sequence
  source: /note="Description of Artificial Sequence: Synthetic polypeptide"
  source: /note="Heavy Chain Combinations of P3D12 IgG histidine scanning variant #100"
QVQLVQSGAEVKKPGASVKVSCKASGYTFTSYWMAWVKQAPGQGLDWIGYIKPSTDNTEYNQKFKDKATLTADKSTSTAYMELSSLRSEDTAVYYCARSYGHYPLMHYWGQGTTVTVSS

SEQ ID NO: 677 - protein, 119 aa, Artificial Sequence
  source: /note="Description of Artificial Sequence: Synthetic polypeptide"
  source: /note="Heavy Chain Combinations of P3D12 IgG histidine scanning variant #101"
QVQLVQSGAEVKKPGASVKVSCKASGYTHTSYWMHWVKQAPGQGLDWIGHIKPSTDNTEYNQKFKDKATLTADKSTSTAYMELSSLRSEDTAVYYCARSYGNHPLMDYWGQGTTVTVSS

SEQ ID NO: 678 - protein, 119 aa, Artificial Sequence
  source: /note="Description of Artificial Sequence: Synthetic polypeptide"
  source: /note="Heavy Chain Combinations of P3D12 IgG histidine scanning variant #102"
QVQLVQSGAEVKKPGASVKVSCKASGYTHTSYWMHWVKQAPGQGLDWIGYIKPSTDNTHYNQKFKDKATLTADKSTSTAYMELSSLRSEDTAVYYCARSYGNHPLMDYWGQGTTVTVSS

SEQ ID NO: 679 - protein, 119 aa, Artificial Sequence
  source: /note="Description of Artificial Sequence: Synthetic polypeptide"
  source: /note="Heavy Chain Combinations of P3D12 IgG histidine scanning variant #103"
QVQLVQSGAEVKKPGASVKVSCKASGYTHTSYWMHWVKQAPGQGLDWIGYIKPSTDNTEYNQKFKDKATLTADKSTSTAYMELSSLRSEDTAVYYCARSYGHHPLMDYWGQGTTVTVSS

SEQ ID NO: 680 - protein, 119 aa, Artificial Sequence
  source: /note="Description of Artificial Sequence: Synthetic polypeptide"
  source: /note="Heavy Chain Combinations of P3D12 IgG histidine scanning variant #104"
QVQLVQSGAEVKKPGASVKVSCKASGYTHTSYWMHWVKQAPGQGLDWIGYIKPSTDNTEYNQKFKDKATLTADKSTSTAYMELSSLRSEDTAVYYCARSYGNHPLMHYWGQGTTVTVSS

SEQ ID NO: 681 - protein, 119 aa, Artificial Sequence
  source: /note="Description of Artificial Sequence: Synthetic polypeptide"
  source: /note="Heavy Chain Combinations of P3D12 IgG histidine scanning variant #105"
QVQLVQSGAEVKKPGASVKVSCKASGYTFTSYWMHWVKQAPGQGLDWIGHIKPSTDNTHYNQKFKDKATLTADKSTSTAYMELSSLRSEDTAVYYCARSYGNHPLMDYWGQGTTVTVSS

SEQ ID NO: 682 - protein, 119 aa, Artificial Sequence
  source: /note="Description of Artificial Sequence: Synthetic polypeptide"
  source: /note="Heavy Chain Combinations of P3D12 IgG histidine scanning variant #106"
QVQLVQSGAEVKKPGASVKVSCKASGYTFTSYWMHWVKQAPGQGLDWIGHIKPSTDNTEYNQKFKDKATLTADKSTSTAYMELSSLRSEDTAVYYCARSYGHHPLMDYWGQGTTVTVSS

SEQ ID NO: 683 - protein, 119 aa, Artificial Sequence
  source: /note="Description of Artificial Sequence: Synthetic polypeptide"
  source: /note="Heavy Chain Combinations of P3D12 IgG histidine scanning variant #107"
QVQLVQSGAEVKKPGASVKVSCKASGYTFTSYWMHWVKQAPGQGLDWIGHIKPSTDNTEYNQKFKDKATLTADKSTSTAYMELSSLRSEDTAVYYCARSYGNHPLMHYWGQGTTVTVSS

SEQ ID NO: 684 - protein, 119 aa, Artificial Sequence
  source: /note="Description of Artificial Sequence: Synthetic polypeptide"
  source: /note="Heavy Chain Combinations of P3D12 IgG histidine scanning variant #108"
QVQLVQSGAEVKKPGASVKVSCKASGYTFTSYWMHWVKQAPGQGLDWIGYIKPSTDNTHYNQKFKDKATLTADKSTSTAYMELSSLRSEDTAVYYCARSYGHHPLMDYWGQGTTVTVSS

SEQ ID NO: 685 - protein, 119 aa, Artificial Sequence
  source: /note="Description of Artificial Sequence: Synthetic polypeptide"
  source: /note="Heavy Chain Combinations of P3D12 IgG histidine scanning variant #109"
QVQLVQSGAEVKKPGASVKVSCKASGYTFTSYWMHWVKQAPGQGLDWIGYIKPSTDNTHYNQKFKDKATLTADKSTSTAYMELSSLRSEDTAVYYCARSYGNHPLMHYWGQGTTVTVSS

SEQ ID NO: 686 - protein, 119 aa, Artificial Sequence
  source: /note="Description of Artificial Sequence: Synthetic polypeptide"
  source: /note="Heavy Chain Combinations of P3D12 IgG histidine scanning variant #110"
QVQLVQSGAEVKKPGASVKVSCKASGYTFTSYWMHWVKQAPGQGLDWIGYIKPSTDNTEYNQKFKDKATLTADKSTSTAYMELSSLRSEDTAVYYCARSYGHHPLMHYWGQGTTVTVSS

SEQ ID NO: 687 - protein, 119 aa, Artificial Sequence
  source: /note="Description of Artificial Sequence: Synthetic polypeptide"
  source: /note="Heavy Chain Combinations of P3D12 IgG histidine scanning variant #111"
QVQLVQSGAEVKKPGASVKVSCKASGYTHTSYWMHWVKQAPGQGLDWIGHIKPSTDNTEYNQKFKDKATLTADKSTSTAYMELSSLRSEDTAVYYCARSYGNYPLHDYWGQGTTVTVSS

SEQ ID NO: 688 - protein, 119 aa, Artificial Sequence
  source: /note="Description of Artificial Sequence: Synthetic polypeptide"
  source: /note="Heavy Chain Combinations of P3D12 IgG histidine scanning variant #112"
QVQLVQSGAEVKKPGASVKVSCKASGYTHTSYWMHWVKQAPGQGLDWIGYIKPSTDNTHYNQKFKDKATLTADKSTSTAYMELSSLRSEDTAVYYCARSYGNYPLHDYWGQGTTVTVSS

SEQ ID NO: 689 - protein, 119 aa, Artificial Sequence
  source: /note="Description of Artificial Sequence: Synthetic polypeptide"
  source: /note="Heavy Chain Combinations of P3D12 IgG histidine scanning variant #113"
QVQLVQSGAEVKKPGASVKVSCKASGYTHTSYWMHWVKQAPGQGLDWIGYIKPSTDNTEYNQKFKDKATLTADKSTSTAYMELSSLRSEDTAVYYCARSYGHYPLHDYWGQGTTVTVSS

SEQ ID NO: 690 - protein, 119 aa, Artificial Sequence
  source: /note="Description of Artificial Sequence: Synthetic polypeptide"
  source: /note="Heavy Chain Combinations of P3D12 IgG histidine scanning variant #114"
QVQLVQSGAEVKKPGASVKVSCKASGYTHTSYWMHWVKQAPGQGLDWIGYIKPSTDNTEYNQKFKDKATLTADKSTSTAYMELSSLRSEDTAVYYCARSYGNYPLHHYWGQGTTVTVSS

SEQ ID NO: 691 - protein, 119 aa, Artificial Sequence
  source: /note="Description of Artificial Sequence: Synthetic polypeptide"
  source: /note="Heavy Chain Combinations of P3D12 IgG histidine scanning variant #115"
QVQLVQSGAEVKKPGASVKVSCKASGYTFTSYWMHWVKQAPGQGLDWIGHIKPSTDNTHYNQKFKDKATLTADKSTSTAYMELSSLRSEDTAVYYCARSYGNYPLHDYWGQGTTVTVSS

SEQ ID NO: 692 - protein, 119 aa, Artificial Sequence
  source: /note="Description of Artificial Sequence: Synthetic polypeptide"
  source: /note="Heavy Chain Combinations of P3D12 IgG histidine scanning variant #116"
QVQLVQSGAEVKKPGASVKVSCKASGYTFTSYWMHWVKQAPGQGLDWIGHIKPSTDNTEYNQKFKDKATLTADKSTSTAYMELSSLRSEDTAVYYCARSYGHYPLHDYWGQGTTVTVSS

SEQ ID NO: 693 - protein, 119 aa, Artificial Sequence
  source: /note="Description of Artificial Sequence: Synthetic polypeptide"
  source: /note="Heavy Chain Combinations of P3D12 IgG histidine scanning variant #117"
QVQLVQSGAEVKKPGASVKVSCKASGYTFTSYWMHWVKQAPGQGLDWIGHIKPSTDNTEYNQKFKDKATLTADKSTSTAYMELSSLRSEDTAVYYCARSYGNYPLHHYWGQGTTVTVSS

SEQ ID NO: 694 - protein, 119 aa, Artificial Sequence
  source: /note="Description of Artificial Sequence: Synthetic polypeptide"
  source: /note="Heavy Chain Combinations of P3D12 IgG histidine scanning variant #118"
QVQLVQSGAEVKKPGASVKVSCKASGYTFTSYWMHWVKQAPGQGLDWIGYIKPSTDNTHYNQKFKDKATLTADKSTSTAYMELSSLRSEDTAVYYCARSYGHYPLHDYWGQGTTVTVSS

SEQ ID NO: 695 - protein, 119 aa, Artificial Sequence
  source: /note="Description of Artificial Sequence: Synthetic polypeptide"
  source: /note="Heavy Chain Combinations of P3D12 IgG histidine scanning variant #119"
QVQLVQSGAEVKKPGASVKVSCKASGYTFTSYWMHWVKQAPGQGLDWIGYIKPSTDNTHYNQKFKDKATLTADKSTSTAYMELSSLRSEDTAVYYCARSYGNYPLHHYWGQGTTVTVSS

SEQ ID NO: 696 - protein, 119 aa, Artificial Sequence
  source: /note="Description of Artificial Sequence: Synthetic polypeptide"
  source: /note="Heavy Chain Combinations of P3D12 IgG histidine scanning variant #120"
QVQLVQSGAEVKKPGASVKVSCKASGYTFTSYWMHWVKQAPGQGLDWIGYIKPSTDNTEYNQKFKDKATLTADKSTSTAYMELSSLRSEDTAVYYCARSYGHYPLHHYWGQGTTVTVSS

SEQ ID NO: 697 - protein, 108 aa, Artificial Sequence
  source: /note="Description of Artificial Sequence: Synthetic polypeptide"
  source: /note="Light Chain Combinations of P3D12 IgG histidine scanning variant #1"
QIVLTQSPAILSLSPGERATLSCSASSSVTSNYLHWYQQKPGSSPKLLIYSTSNLASGVPARFSGSGSGTSYTLTISSLEAEDAASYFCHQWSHYPPTFGSGTKLEIK

SEQ ID NO: 698 - protein, 108 aa, Artificial Sequence
  source: /note="Description of Artificial Sequence: Synthetic polypeptide"
  source: /note="Light Chain Combinations of P3D12 IgG histidine scanning variant #2"
QIVLTQSPAILSLSPGERATLSCSASSSVTSNYLHWYQQKPGSSPKLLIYSTSNLASGVPARFSGSGSGTSYTLTISSLEAEDAASYFCHQWSSHPPTFGSGTKLEIK

SEQ ID NO: 699 - protein, 108 aa, Artificial Sequence
  source: /note="Description of Artificial Sequence: Synthetic polypeptide"
  source: /note="Light Chain Combinations of P3D12 IgG histidine scanning variant #3"
QIVLTQSPAILSLSPGERATLSCSASSSVTSNYLHWYQQKPGSSPKLLIYSTSNLASGVPARFSGSGSGTSYTLTISSLEAEDAASYFCHQWSSYHPTFGSGTKLEIK

SEQ ID NO: 700 - protein, 108 aa, Artificial Sequence
  source: /note="Description of Artificial Sequence: Synthetic polypeptide"
  source: /note="Light Chain Combinations of P3D12 IgG histidine scanning variant #4"
QIVLTQSPAILSLSPGERATLSCSASSSVTSNYLHWYQQKPGSSPKLLIYSTSNLASGVPARFSGSGSGTSYTLTISSLEAEDAASYFCHQWSSYPHTFGSGTKLEIK

SEQ ID NO: 701 - protein, 108 aa, Artificial Sequence
  source: /note="Description of Artificial Sequence: Synthetic polypeptide"
  source: /note="Light Chain Combinations of P3D12 IgG histidine scanning variant #5"
QIVLTQSPAILSLSPGERATLSCSASSSVTSNYLYWYQQKPGSSPKLLIYSTSNLASGVPARFSGSGSGTSYTLTISSLEAEDAASYFCHQWSHHPPTFGSGTKLEIK

SEQ ID NO: 702 - protein, 108 aa, Artificial Sequence
  source: /note="Description of Artificial Sequence: Synthetic polypeptide"
  source: /note="Light Chain Combinations of P3D12 IgG histidine scanning variant #6"
QIVLTQSPAILSLSPGERATLSCSASSSVTSNYLYWYQQKPGSSPKLLIYSTSNLASGVPARFSGSGSGTSYTLTISSLEAEDAASYFCHQWSHYHPTFGSGTKLEIK

SEQ ID NO: 703 - protein, 108 aa, Artificial Sequence
  source: /note="Description of Artificial Sequence: Synthetic polypeptide"
  source: /note="Light Chain Combinations of P3D12 IgG histidine scanning variant #7"
QIVLTQSPAILSLSPGERATLSCSASSSVTSNYLYWYQQKPGSSPKLLIYSTSNLASGVPARFSGSGSGTSYTLTISSLEAEDAASYFCHQWSHYPHTFGSGTKLEIK

SEQ ID NO: 704 - protein, 108 aa, Artificial Sequence
  source: /note="Description of Artificial Sequence: Synthetic polypeptide"
  source: /note="Light Chain Combinations of P3D12 IgG histidine scanning variant #8"
QIVLTQSPAILSLSPGERATLSCSASSSVTSNYLYWYQQKPGSSPKLLIYSTSNLASGVPARFSGSGSGTSYTLTISSLEAEDAASYFCHQWSSHHPTFGSGTKLEIK

SEQ ID NO: 705 - protein, 108 aa, Artificial Sequence
  source: /note="Description of Artificial Sequence: Synthetic polypeptide"
  source: /note="Light Chain Combinations of P3D12 IgG histidine scanning variant #9"
QIVLTQSPAILSLSPGERATLSCSASSSVTSNYLYWYQQKPGSSPKLLIYSTSNLASGVPARFSGSGSGTSYTLTISSLEAEDAASYFCHQWSSHPHTFGSGTKLEIK

SEQ ID NO: 706 - protein, 108 aa, Artificial Sequence
  source: /note="Description of Artificial Sequence: Synthetic polypeptide"
  source: /note="Light Chain Combinations of P3D12 IgG histidine scanning variant #10"
QIVLTQSPAILSLSPGERATLSCSASSSVTSNYLYWYQQKPGSSPKLLIYSTSNLASGVPARFSGSGSGTSYTLTISSLEAEDAASYFCHQWSSYHHTFGSGTKLEIK

SEQ ID NO: 707 - protein, 108 aa, Artificial Sequence
  source: /note="Description of Artificial Sequence: Synthetic polypeptide"
  source: /note="Light Chain Combinations of P3D12 IgG histidine scanning variant #11"
QIVLTQSPAILSLSPGERATLSCSASSSVTSNYLHWYQQKPGSSPKLLIYSTSNLASGVPARFSGSGSGTSYTLTISSLEAEDAASYFCHQWSHHPPTFGSGTKLEIK

SEQ ID NO: 708 - protein, 108 aa, Artificial Sequence
  source: /note="Description of Artificial Sequence: Synthetic polypeptide"
  source: /note="Light Chain Combinations of P3D12 IgG histidine scanning variant #12"
QIVLTQSPAILSLSPGERATLSCSASSSVTSNYLHWYQQKPGSSPKLLIYSTSNLASGVPARFSGSGSGTSYTLTISSLEAEDAASYFCHQWSHYHPTFGSGTKLEIK

SEQ ID NO: 709 - protein, 108 aa, Artificial Sequence
  source: /note="Description of Artificial Sequence: Synthetic polypeptide"
  source: /note="Light Chain Combinations of P3D12 IgG histidine scanning variant #13"
QIVLTQSPAILSLSPGERATLSCSASSSVTSNYLHWYQQKPGSSPKLLIYSTSNLASGVPARFSGSGSGTSYTLTISSLEAEDAASYFCHQWSHYPHTFGSGTKLEIK

SEQ ID NO: 710 - protein, 108 aa, Artificial Sequence
  source: /note="Description of Artificial Sequence: Synthetic polypeptide"
  source: /note="Light Chain Combinations of P3D12 IgG histidine scanning variant #14"
QIVLTQSPAILSLSPGERATLSCSASSSVTSNYLHWYQQKPGSSPKLLIYSTSNLASGVPARFSGSGSGTSYTLTISSLEAEDAASYFCHQWSSHHPTFGSGTKLEIK

SEQ ID NO: 711 - protein, 108 aa, Artificial Sequence
  source: /note="Description of Artificial Sequence: Synthetic polypeptide"
  source: /note="Light Chain Combinations of P3D12 IgG histidine scanning variant #15"
QIVLTQSPAILSLSPGERATLSCSASSSVTSNYLHWYQQKPGSSPKLLIYSTSNLASGVPARFSGSGSGTSYTLTISSLEAEDAASYFCHQWSSHPHTFGSGTKLEIK

SEQ ID NO: 712 - protein, 108 aa, Artificial Sequence
  source: /note="Description of Artificial Sequence: Synthetic polypeptide"
  source: /note="Light Chain Combinations of P3D12 IgG histidine scanning variant #16"
QIVLTQSPAILSLSPGERATLSCSASSSVTSNYLHWYQQKPGSSPKLLIYSTSNLASGVPARFSGSGSGTSYTLTISSLEAEDAASYFCHQWSSYHHTFGSGTKLEIK

SEQ ID NO: 713 - protein, 108 aa, Artificial Sequence
  source: /note="Description of Artificial Sequence: Synthetic polypeptide"
  source: /note="Light Chain Combinations of P3D12 IgG histidine scanning variant #17"
QIVLTQSPAILSLSPGERATLSCSASSSVTSNYLYWYQQKPGSSPKLLIYSTSNLASGVPARFSGSGSGTSYTLTISSLEAEDAASYFCHQWSHHHPTFGSGTKLEIK

SEQ ID NO: 714 - protein, 108 aa, Artificial Sequence
  source: /note="Description of Artificial Sequence: Synthetic polypeptide"
  source: /note="Light Chain Combinations of P3D12 IgG histidine scanning variant #18"
QIVLTQSPAILSLSPGERATLSCSASSSVTSNYLYWYQQKPGSSPKLLIYSTSNLASGVPARFSGSGSGTSYTLTISSLEAEDAASYFCHQWSHHPHTFGSGTKLEIK

SEQ ID NO: 715 - protein, 108 aa, Artificial Sequence
  source: /note="Description of Artificial Sequence: Synthetic polypeptide"
  source: /note="Light Chain Combinations of P3D12 IgG histidine scanning variant #19"
QIVLTQSPAILSLSPGERATLSCSASSSVTSNYLYWYQQKPGSSPKLLIYSTSNLASGVPARFSGSGSGTSYTLTISSLEAEDAASYFCHQWSHYHHTFGSGTKLEIK

SEQ ID NO: 716 - protein, 108 aa, Artificial Sequence
  source: /note="Description of Artificial Sequence: Synthetic polypeptide"
  source: /note="Light Chain Combinations of P3D12 IgG histidine scanning variant #20"
QIVLTQSPAILSLSPGERATLSCSASSSVTSNYLYWYQQKPGSSPKLLIYSTSNLASGVPARFSGSGSGTSYTLTISSLEAEDAASYFCHQWSSHHHTFGSGTKLEIK

SEQ ID NO: 717 - protein, 108 aa, Artificial Sequence
  source: /note="Description of Artificial Sequence: Synthetic polypeptide"
  source: /note="Light Chain Combinations of P3D12 IgG histidine scanning variant #21"
QIVLTQSPAILSLSPGERATLSCSASSSHTSNYLHWYQQKPGSSPKLLIYSTSNLASGVPARFSGSGSGTSYTLTISSLEAEDAASYFCHQWSSYPPTFGSGTKLEIK

SEQ ID NO: 718 - protein, 108 aa, Artificial Sequence
  source: /note="Description of Artificial Sequence: Synthetic polypeptide"
  source: /note="Light Chain Combinations of P3D12 IgG histidine scanning variant #22"
QIVLTQSPAILSLSPGERATLSCSASSSHTSNYLYWYQQKPGSSPKLLIYSTSNLASGVPARFSGSGSGTSYTLTISSLEAEDAASYFCHQWSHYPPTFGSGTKLEIK

SEQ ID NO: 719 - protein, 108 aa, Artificial Sequence
  source: /note="Description of Artificial Sequence: Synthetic polypeptide"
  source: /note="Light Chain Combinations of P3D12 IgG histidine scanning variant #23"
QIVLTQSPAILSLSPGERATLSCSASSSHTSNYLYWYQQKPGSSPKLLIYSTSNLASGVPARFSGSGSGTSYTLTISSLEAEDAASYFCHQWSSHPPTFGSGTKLEIK

SEQ ID NO: 720 - protein, 108 aa, Artificial Sequence
  source: /note="Description of Artificial Sequence: Synthetic polypeptide"
  source: /note="Light Chain Combinations of P3D12 IgG histidine scanning variant #24"
QIVLTQSPAILSLSPGERATLSCSASSSHTSNYLYWYQQKPGSSPKLLIYSTSNLASGVPARFSGSGSGTSYTLTISSLEAEDAASYFCHQWSSYHPTFGSGTKLEIK

SEQ ID NO: 721 - protein, 108 aa, Artificial Sequence
  source: /note="Description of Artificial Sequence: Synthetic polypeptide"
  source: /note="Light Chain Combinations of P3D12 IgG histidine scanning variant #25"
QIVLTQSPAILSLSPGERATLSCSASSSVTSHYLHWYQQKPGSSPKLLIYSTSNLASGVPARFSGSGSGTSYTLTISSLEAEDAASYFCHQWSSYPPTFGSGTKLEIK

SEQ ID NO: 722 - protein, 108 aa, Artificial Sequence
  source: /note="Description of Artificial Sequence: Synthetic polypeptide"
  source: /note="Light Chain Combinations of P3D12 IgG histidine scanning variant #26"
QIVLTQSPAILSLSPGERATLSCSASSSVTSHYLYWYQQKPGSSPKLLIYSTSNLASGVPARFSGSGSGTSYTLTISSLEAEDAASYFCHQWSHYPPTFGSGTKLEIK

SEQ ID NO: 723 - protein, 108 aa, Artificial Sequence
  source: /note="Description of Artificial Sequence: Synthetic polypeptide"
  source: /note="Light Chain Combinations of P3D12 IgG histidine scanning variant #27"
QIVLTQSPAILSLSPGERATLSCSASSSVTSHYLYWYQQKPGSSPKLLIYSTSNLASGVPARFSGSGSGTSYTLTISSLEAEDAASYFCHQWSSHPPTFGSGTKLEIK

SEQ ID NO: 724 - protein, 108 aa, Artificial Sequence
  source: /note="Description of Artificial Sequence: Synthetic polypeptide"
  source: /note="Light Chain Combinations of P3D12 IgG histidine scanning variant #28"
QIVLTQSPAILSLSPGERATLSCSASSSVTSHYLYWYQQKPGSSPKLLIYSTSNLASGVPARFSGSGSGTSYTLTISSLEAEDAASYFCHQWSSYHPTFGSGTKLEIK

SEQ ID NO: 725 - protein, 108 aa, Artificial Sequence
  source: /note="Description of Artificial Sequence: Synthetic polypeptide"
  source: /note="Light Chain Combinations of P3D12 IgG histidine scanning variant #29"
QIVLTQSPAILSLSPGERATLSCSASSSVTSNYLHWYQQKPGSSPKLLIYSTSNLASGVPARFSGSGSGTSYTLTISSLEAEDAASYFCHQHSSYPPTFGSGTKLEIK

SEQ ID NO: 726 - protein, 108 aa, Artificial Sequence
  source: /note="Description of Artificial Sequence: Synthetic polypeptide"
  source: /note="Light Chain Combinations of P3D12 IgG histidine scanning variant #30"
QIVLTQSPAILSLSPGERATLSCSASSSVTSNYLYWYQQKPGSSPKLLIYSTSNLASGVPARFSGSGSGTSYTLTISSLEAEDAASYFCHQHSHYPPTFGSGTKLEIK

SEQ ID NO: 727 - protein, 108 aa, Artificial Sequence
  source: /note="Description of Artificial Sequence: Synthetic polypeptide"
  source: /note="Light Chain Combinations of P3D12 IgG histidine scanning variant #31"
QIVLTQSPAILSLSPGERATLSCSASSSVTSNYLYWYQQKPGSSPKLLIYSTSNLASGVPARFSGSGSGTSYTLTISSLEAEDAASYFCHQHSSHPPTFGSGTKLEIK

SEQ ID NO: 728 - protein, 108 aa, Artificial Sequence
  source: /note="Description of Artificial Sequence: Synthetic polypeptide"
  source: /note="Light Chain Combinations of P3D12 IgG histidine scanning variant #32"
QIVLTQSPAILSLSPGERATLSCSASSSVTSNYLYWYQQKPGSSPKLLIYSTSNLASGVPARFSGSGSGTSYTLTISSLEAEDAASYFCHQHSSYHPTFGSGTKLEIK

SEQ ID NO: 729 - protein, 108 aa, Artificial Sequence
  source: /note="Description of Artificial Sequence: Synthetic polypeptide"
  source: /note="Light Chain Combinations of P3D12 IgG histidine scanning variant #33"
QIVLTQSPAILSLSPGERATLSCSASSSVTSNYLHWYQQKPGSSPKLLIYSTSNLASGVPARFSGSGSGTSYTLTISSLEAEDAASYFCHQWSSYPPHFGSGTKLEIK

SEQ ID NO: 730 - protein, 108 aa, Artificial Sequence
  source: /note="Description of Artificial Sequence: Synthetic polypeptide"
  source: /note="Light Chain Combinations of P3D12 IgG histidine scanning variant #34"
QIVLTQSPAILSLSPGERATLSCSASSSVTSNYLYWYQQKPGSSPKLLIYSTSNLASGVPARFSGSGSGTSYTLTISSLEAEDAASYFCHQWSHYPPHFGSGTKLEIK

SEQ ID NO: 731 - protein, 108 aa, Artificial Sequence
  source: /note="Description of Artificial Sequence: Synthetic polypeptide"
  source: /note="Light Chain Combinations of P3D12 IgG histidine scanning variant #35"
QIVLTQSPAILSLSPGERATLSCSASSSVTSNYLYWYQQKPGSSPKLLIYSTSNLASGVPARFSGSGSGTSYTLTISSLEAEDAASYFCHQWSSHPPHFGSGTKLEIK

SEQ ID NO: 732 - protein, 108 aa, Artificial Sequence
  source: /note="Description of Artificial Sequence: Synthetic polypeptide"
  source: /note="Light Chain Combinations of P3D12 IgG histidine scanning variant #36"
QIVLTQSPAILSLSPGERATLSCSASSSVTSNYLYWYQQKPGSSPKLLIYSTSNLASGVPARFSGSGSGTSYTLTISSLEAEDAASYFCHQWSSYHPHFGSGTKLEIK

SEQ ID NO: 733 - protein, 108 aa, Artificial Sequence
  source: /note="Description of Artificial Sequence: Synthetic polypeptide"
  source: /note="Light Chain Combinations of P3D12 IgG histidine scanning variant #37"
QIVLTQSPAILSLSPGERATLSCSASSSHTSHYLYWYQQKPGSSPKLLIYSTSNLASGVPARFSGSGSGTSYTLTISSLEAEDAASYFCHQWSSYPPTFGSGTKLEIK

SEQ ID NO: 734 - protein, 108 aa, Artificial Sequence
  source: /note="Description of Artificial Sequence: Synthetic polypeptide"
  source: /note="Light Chain Combinations of P3D12 IgG histidine scanning variant #38"
QIVLTQSPAILSLSPGERATLSCSASSSHTSNYLYWYQQKPGSSPKLLIYSTSNLASGVPARFSGSGSGTSYTLTISSLEAEDAASYFCHQHSSYPPTFGSGTKLEIK

SEQ ID NO: 735 - protein, 108 aa, Artificial Sequence
  source: /note="Description of Artificial Sequence: Synthetic polypeptide"
  source: /note="Light Chain Combinations of P3D12 IgG histidine scanning variant #39"
QIVLTQSPAILSLSPGERATLSCSASSSHTSNYLYWYQQKPGSSPKLLIYSTSNLASGVPARFSGSGSGTSYTLTISSLEAEDAASYFCHQWSSYPPHFGSGTKLEIK

SEQ ID NO: 736 - protein, 108 aa, Artificial Sequence
  source: /note="Description of Artificial Sequence: Synthetic polypeptide"
  source: /note="Light Chain Combinations of P3D12 IgG histidine scanning variant #40"
QIVLTQSPAILSLSPGERATLSCSASSSVTSHYLYWYQQKPGSSPKLLIYSTSNLASGVPARFSGSGSGTSYTLTISSLEAEDAASYFCHQHSSYPPTFGSGTKLEIK

SEQ ID NO: 737 - protein, 108 aa, Artificial Sequence
  source: /note="Description of Artificial Sequence: Synthetic polypeptide"
  source: /note="Light Chain Combinations of P3D12 IgG histidine scanning variant #41"
QIVLTQSPAILSLSPGERATLSCSASSSVTSHYLYWYQQKPGSSPKLLIYSTSNLASGVPARFSGSGSGTSYTLTISSLEAEDAASYFCHQWSSYPPHFGSGTKLEIK

SEQ ID NO: 738 - protein, 108 aa, Artificial Sequence
  source: /note="Description of Artificial Sequence: Synthetic polypeptide"
  source: /note="Light Chain Combinations of P3D12 IgG histidine scanning variant #42"
QIVLTQSPAILSLSPGERATLSCSASSSVTSNYLYWYQQKPGSSPKLLIYSTSNLASGVPARFSGSGSGTSYTLTISSLEAEDAASYFCHQHSSYPPHFGSGTKLEIK

SEQ ID NO: 739 - protein, 108 aa, Artificial Sequence
  source: /note="Description of Artificial Sequence: Synthetic polypeptide"
  source: /note="Light Chain Combinations of P3D12 IgG histidine scanning variant #43"
QIVLTQSPAILSLSPGERATLSCSASSSHTSHYLYWYQQKPGSSPKLLIYSTSNLASGVPARFSGSGSGTSYTLTISSLEAEDAASYFCHQHSSYPPTFGSGTKLEIK

SEQ ID NO: 740 - protein, 108 aa, Artificial Sequence
  source: /note="Description of Artificial Sequence: Synthetic polypeptide"
  source: /note="Light Chain Combinations of P3D12 IgG histidine scanning variant #44"
QIVLTQSPAILSLSPGERATLSCSASSSHTSHYLYWYQQKPGSSPKLLIYSTSNLASGVPARFSGSGSGTSYTLTISSLEAEDAASYFCHQWSSYPPHFGSGTKLEIK

SEQ ID NO: 741 - protein, 108 aa, Artificial Sequence
  source: /note="Description of Artificial Sequence: Synthetic polypeptide"
  source: /note="Light Chain Combinations of P3D12 IgG histidine scanning variant #45"
QIVLTQSPAILSLSPGERATLSCSASSSHTSNYLYWYQQKPGSSPKLLIYSTSNLASGVPARFSGSGSGTSYTLTISSLEAEDAASYFCHQHSSYPPHFGSGTKLEIK

SEQ ID NO: 742 - protein, 108 aa, Artificial Sequence
  source: /note="Description of Artificial Sequence: Synthetic polypeptide"
  source: /note="Light Chain Combinations of P3D12 IgG histidine scanning variant #46"
QIVLTQSPAILSLSPGERATLSCSASSSVTSHYLYWYQQKPGSSPKLLIYSTSNLASGVPARFSGSGSGTSYTLTISSLEAEDAASYFCHQHSSYPPHFGSGTKLEIK

SEQ ID NO: 743 - protein, 108 aa, Artificial Sequence
  source: /note="Description of Artificial Sequence: Synthetic polypeptide"
  source: /note="Light Chain Combinations of P3D12 IgG histidine scanning variant #47"
QIVLTQSPAILSLSPGERATLSCSASSSHTSHYLHWYQQKPGSSPKLLIYSTSNLASGVPARFSGSGSGTSYTLTISSLEAEDAASYFCHQWSSYPPTFGSGTKLEIK

SEQ ID NO: 744 - protein, 108 aa, Artificial Sequence
  source: /note="Description of Artificial Sequence: Synthetic polypeptide"
  source: /note="Light Chain Combinations of P3D12 IgG histidine scanning variant #48"
QIVLTQSPAILSLSPGERATLSCSASSSHTSNYLHWYQQKPGSSPKLLIYSTSNLASGVPARFSGSGSGTSYTLTISSLEAEDAASYFCHQHSSYPPTFGSGTKLEIK

SEQ ID NO: 745 - protein, 108 aa, Artificial Sequence
  source: /note="Description of Artificial Sequence: Synthetic polypeptide"
  source: /note="Light Chain Combinations of P3D12 IgG histidine scanning variant #49"
QIVLTQSPAILSLSPGERATLSCSASSSHTSNYLHWYQQKPGSSPKLLIYSTSNLASGVPARFSGSGSGTSYTLTISSLEAEDAASYFCHQWSSYPPHFGSGTKLEIK

SEQ ID NO: 746 - protein, 108 aa, Artificial Sequence
  source: /note="Description of Artificial Sequence: Synthetic polypeptide"
  source: /note="Light Chain Combinations of P3D12 IgG histidine scanning variant #50"
QIVLTQSPAILSLSPGERATLSCSASSSVTSHYLHWYQQKPGSSPKLLIYSTSNLASGVPARFSGSGSGTSYTLTISSLEAEDAASYFCHQHSSYPPTFGSGTKLEIK

SEQ ID NO: 747 - protein, 108 aa, Artificial Sequence
  source: /note="Description of Artificial Sequence: Synthetic polypeptide"
  source: /note="Light Chain Combinations of P3D12 IgG histidine scanning variant #51"
QIVLTQSPAILSLSPGERATLSCSASSSVTSHYLHWYQQKPGSSPKLLIYSTSNLASGVPARFSGSGSGTSYTLTISSLEAEDAASYFCHQWSSYPPHFGSGTKLEIK

SEQ ID NO: 748 - protein, 108 aa, Artificial Sequence
  source: /note="Description of Artificial Sequence: Synthetic polypeptide"
  source: /note="Light Chain Combinations of P3D12 IgG histidine scanning variant #52"
QIVLTQSPAILSLSPGERATLSCSASSSVTSNYLHWYQQKPGSSPKLLIYSTSNLASGVPARFSGSGSGTSYTLTISSLEAEDAASYFCHQHSSYPPHFGSGTKLEIK

SEQ ID NO: 749 - protein, 108 aa, Artificial Sequence
  source: /note="Description of Artificial Sequence: Synthetic polypeptide"
  source: /note="Light Chain Combinations of P3D12 IgG histidine scanning variant #53"
QIVLTQSPAILSLSPGERATLSCSASSSHTSHYLYWYQQKPGSSPKLLIYSTSNLASGVPARFSGSGSGTSYTLTISSLEAEDAASYFCHQWSHYPPTFGSGTKLEIK

SEQ ID NO: 750 - protein, 108 aa, Artificial Sequence
  source: /note="Description of Artificial Sequence: Synthetic polypeptide"
  source: /note="Light Chain Combinations of P3D12 IgG histidine scanning variant #54"
QIVLTQSPAILSLSPGERATLSCSASSSHTSNYLYWYQQKPGSSPKLLIYSTSNLASGVPARFSGSGSGTSYTLTISSLEAEDAASYFCHQHSHYPPTFGSGTKLEIK

SEQ ID NO: 751 - protein, 108 aa, Artificial Sequence
  source: /note="Description of Artificial Sequence: Synthetic polypeptide"
  source: /note="Light Chain Combinations of P3D12 IgG histidine scanning variant #55"
QIVLTQSPAILSLSPGERATLSCSASSSHTSNYLYWYQQKPGSSPKLLIYSTSNLASGVPARFSGSGSGTSYTLTISSLEAEDAASYFCHQWSHYPPHFGSGTKLEIK

SEQ ID NO: 752 - protein, 108 aa, Artificial Sequence
  source: /note="Description of Artificial Sequence: Synthetic polypeptide"
  source: /note="Light Chain Combinations of P3D12 IgG histidine scanning variant #56"
QIVLTQSPAILSLSPGERATLSCSASSSVTSHYLYWYQQKPGSSPKLLIYSTSNLASGVPARFSGSGSGTSYTLTISSLEAEDAASYFCHQHSHYPPTFGSGTKLEIK

SEQ ID NO: 753 - protein, 108 aa, Artificial Sequence
  source: /note="Description of Artificial Sequence: Synthetic polypeptide"
  source: /note="Light Chain Combinations of P3D12 IgG histidine scanning variant #57"
QIVLTQSPAILSLSPGERATLSCSASSSVTSHYLYWYQQKPGSSPKLLIYSTSNLASGVPARFSGSGSGTSYTLTISSLEAEDAASYFCHQWSHYPPHFGSGTKLEIK

SEQ ID NO: 754 - protein, 108 aa, Artificial Sequence
  source: /note="Description of Artificial Sequence: Synthetic polypeptide"
  source: /note="Light Chain Combinations of P3D12 IgG histidine scanning variant #58"
QIVLTQSPAILSLSPGERATLSCSASSSVTSNYLYWYQQKPGSSPKLLIYSTSNLASGVPARFSGSGSGTSYTLTISSLEAEDAASYFCHQHSHYPPHFGSGTKLEIK

SEQ ID NO: 755 - protein, 108 aa, Artificial Sequence
  source: /note="Description of Artificial Sequence: Synthetic polypeptide"
  source: /note="Light Chain Combinations of P3D12 IgG histidine scanning variant #59"
QIVLTQSPAILSLSPGERATLSCSASSSHTSHYLYWYQQKPGSSPKLLIYSTSNLASGVPARFSGSGSGTSYTLTISSLEAEDAASYFCHQWSSHPPTFGSGTKLEIK

SEQ ID NO: 756 - protein, 108 aa, Artificial Sequence
  source: /note="Description of Artificial Sequence: Synthetic polypeptide"
  source: /note="Light Chain Combinations of P3D12 IgG histidine scanning variant #60"
QIVLTQSPAILSLSPGERATLSCSASSSHTSNYLYWYQQKPGSSPKLLIYSTSNLASGVPARFSGSGSGTSYTLTISSLEAEDAASYFCHQHSSHPPTFGSGTKLEIK

SEQ ID NO: 757 - protein, 108 aa, Artificial Sequence
  source: /note="Description of Artificial Sequence: Synthetic polypeptide"
  source: /note="Light Chain Combinations of P3D12 IgG histidine scanning variant #61"
QIVLTQSPAILSLSPGERATLSCSASSSHTSNYLYWYQQKPGSSPKLLIYSTSNLASGVPARFSGSGSGTSYTLTISSLEAEDAASYFCHQWSSHPPHFGSGTKLEIK

SEQ ID NO: 758 - protein, 108 aa, Artificial Sequence
  source: /note="Description of Artificial Sequence: Synthetic polypeptide"
  source: /note="Light Chain Combinations of P3D12 IgG histidine scanning variant #62"
QIVLTQSPAILSLSPGERATLSCSASSSVTSHYLYWYQQKPGSSPKLLIYSTSNLASGVPARFSGSGSGTSYTLTISSLEAEDAASYFCHQHSSHPPTFGSGTKLEIK

SEQ ID NO: 759 - protein, 108 aa, Artificial Sequence
  source: /note="Description of Artificial Sequence: Synthetic polypeptide"
  source: /note="Light Chain Combinations of P3D12 IgG histidine scanning variant #63"
QIVLTQSPAILSLSPGERATLSCSASSSVTSHYLYWYQQKPGSSPKLLIYSTSNLASGVPARFSGSGSGTSYTLTISSLEAEDAASYFCHQWSSHPPHFGSGTKLEIK

SEQ ID NO: 760 - protein, 108 aa, Artificial Sequence
  source: /note="Description of Artificial Sequence: Synthetic polypeptide"
  source: /note="Light Chain Combinations of P3D12 IgG histidine scanning variant #64"
QIVLTQSPAILSLSPGERATLSCSASSSVTSNYLYWYQQKPGSSPKLLIYSTSNLASGVPARFSGSGSGTSYTLTISSLEAEDAASYFCHQHSSHPPHFGSGTKLEIK

SEQ ID NO: 761 - protein, 108 aa, Artificial Sequence
  source: /note="Description of Artificial Sequence: Synthetic polypeptide"
  source: /note="Light Chain Combinations of P3D12 IgG histidine scanning variant #65"
QIVLTQSPAILSLSPGERATLSCSASSSHTSHYLYWYQQKPGSSPKLLIYSTSNLASGVPARFSGSGSGTSYTLTISSLEAEDAASYFCHQWSSYHPTFGSGTKLEIK

SEQ ID NO: 762 - protein, 108 aa, Artificial Sequence
  source: /note="Description of Artificial Sequence: Synthetic polypeptide"
  source: /note="Light Chain Combinations of P3D12 IgG histidine scanning variant #66"
QIVLTQSPAILSLSPGERATLSCSASSSHTSNYLYWYQQKPGSSPKLLIYSTSNLASGVPARFSGSGSGTSYTLTISSLEAEDAASYFCHQHSSYHPTFGSGTKLEIK

SEQ ID NO: 763 - protein, 108 aa, Artificial Sequence
  source: /note="Description of Artificial Sequence: Synthetic polypeptide"
  source: /note="Light Chain Combinations of P3D12 IgG histidine scanning variant #67"
QIVLTQSPAILSLSPGERATLSCSASSSHTSNYLYWYQQKPGSSPKLLIYSTSNLASGVPARFSGSGSGTSYTLTISSLEAEDAASYFCHQWSSYHPHFGSGTKLEIK

SEQ ID NO: 764 - protein, 108 aa, Artificial Sequence
  source: /note="Description of Artificial Sequence: Synthetic polypeptide"
  source: /note="Light Chain Combinations of P3D12 IgG histidine scanning variant #68"
QIVLTQSPAILSLSPGERATLSCSASSSVTSHYLYWYQQKPGSSPKLLIYSTSNLASGVPARFSGSGSGTSYTLTISSLEAEDAASYFCHQHSSYHPTFGSGTKLEIK

SEQ ID NO: 765 - protein, 108 aa, Artificial Sequence
  source: /note="Description of Artificial Sequence: Synthetic polypeptide"
  source: /note="Light Chain Combinations of P3D12 IgG histidine scanning variant #69"
QIVLTQSPAILSLSPGERATLSCSASSSVTSHYLYWYQQKPGSSPKLLIYSTSNLASGVPARFSGSGSGTSYTLTISSLEAEDAASYFCHQWSSYHPHFGSGTKLEIK

SEQ ID NO: 766 - protein, 108 aa, Artificial Sequence
  source: /note="Description of Artificial Sequence: Synthetic polypeptide"
  source: /note="Light Chain Combinations of P3D12 IgG histidine scanning variant #70"
QIVLTQSPAILSLSPGERATLSCSASSSVTSNYLYWYQQKPGSSPKLLIYSTSNLASGVPARFSGSGSGTSYTLTISSLEAEDAASYFCHQHSSYHPHFGSGTKLEIK

SEQ ID NO: 767 - protein, 108 aa, Artificial Sequence
  source: /note="Description of Artificial Sequence: Synthetic polypeptide"
  source: /note="Light Chain Combinations of P3D12 IgG histidine scanning variant #71"
QIVLTQSPAILSLSPGERATLSCSASSSHTSNYLHWYQQKPGSSPKLLIYSTSNLASGVPARFSGSGSGTSYTLTISSLEAEDAASYFCHQWSHYPPTFGSGTKLEIK

SEQ ID NO: 768 - protein, 108 aa, Artificial Sequence
  source: /note="Description of Artificial Sequence: Synthetic polypeptide"
  source: /note="Light Chain Combinations of P3D12 IgG histidine scanning variant #72"
QIVLTQSPAILSLSPGERATLSCSASSSHTSNYLHWYQQKPGSSPKLLIYSTSNLASGVPARFSGSGSGTSYTLTISSLEAEDAASYFCHQWSSHPPTFGSGTKLEIK

SEQ ID NO: 769 - protein, 108 aa, Artificial Sequence
  source: /note="Description of Artificial Sequence: Synthetic polypeptide"
  source: /note="Light Chain Combinations of P3D12 IgG histidine scanning variant #73"
QIVLTQSPAILSLSPGERATLSCSASSSHTSNYLHWYQQKPGSSPKLLIYSTSNLASGVPARFSGSGSGTSYTLTISSLEAEDAASYFCHQWSSYHPTFGSGTKLEIK

SEQ ID NO: 770 - protein, 108 aa, Artificial Sequence
  source: /note="Description of Artificial Sequence: Synthetic polypeptide"
  source: /note="Light Chain Combinations of P3D12 IgG histidine scanning variant #74"
QIVLTQSPAILSLSPGERATLSCSASSSHTSNYLYWYQQKPGSSPKLLIYSTSNLASGVPARFSGSGSGTSYTLTISSLEAEDAASYFCHQWSHHPPTFGSGTKLEIK

SEQ ID NO: 771 - protein, 108 aa, Artificial Sequence
  source: /note="Description of Artificial Sequence: Synthetic polypeptide"
  source: /note="Light Chain Combinations of P3D12 IgG histidine scanning variant #75"
QIVLTQSPAILSLSPGERATLSCSASSSHTSNYLYWYQQKPGSSPKLLIYSTSNLASGVPARFSGSGSGTSYTLTISSLEAEDAASYFCHQWSHYHPTFGSGTKLEIK

SEQ ID NO: 772 - protein, 108 aa, Artificial Sequence
  source: /note="Description of Artificial Sequence: Synthetic polypeptide"
  source: /note="Light Chain Combinations of P3D12 IgG histidine scanning variant #76"
QIVLTQSPAILSLSPGERATLSCSASSSHTSNYLYWYQQKPGSSPKLLIYSTSNLASGVPARFSGSGSGTSYTLTISSLEAEDAASYFCHQWSSHHPTFGSGTKLEIK

SEQ ID NO: 773 - protein, 108 aa, Artificial Sequence
  source: /note="Description of Artificial Sequence: Synthetic polypeptide"
  source: /note="Light Chain Combinations of P3D12 IgG histidine scanning variant #77"
QIVLTQSPAILSLSPGERATLSCSASSSVTSHYLHWYQQKPGSSPKLLIYSTSNLASGVPARFSGSGSGTSYTLTISSLEAEDAASYFCHQWSHYPPTFGSGTKLEIK

SEQ ID NO: 774 - protein, 108 aa, Artificial Sequence
  source: /note="Description of Artificial Sequence: Synthetic polypeptide"
  source: /note="Light Chain Combinations of P3D12 IgG histidine scanning variant #78"
QIVLTQSPAILSLSPGERATLSCSASSSVTSHYLHWYQQKPGSSPKLLIYSTSNLASGVPARFSGSGSGTSYTLTISSLEAEDAASYFCHQWSSHPPTFGSGTKLEIK

SEQ ID NO: 775 - protein, 108 aa, Artificial Sequence
  source: /note="Description of Artificial Sequence: Synthetic polypeptide"
  source: /note="Light Chain Combinations of P3D12 IgG histidine scanning variant #79"
QIVLTQSPAILSLSPGERATLSCSASSSVTSHYLHWYQQKPGSSPKLLIYSTSNLASGVPARFSGSGSGTSYTLTISSLEAEDAASYFCHQWSSYHPTFGSGTKLEIK

SEQ ID NO: 776 - protein, 108 aa, Artificial Sequence
  source: /note="Description of Artificial Sequence: Synthetic polypeptide"
  source: /note="Light Chain Combinations of P3D12 IgG histidine scanning variant #80"
QIVLTQSPAILSLSPGERATLSCSASSSVTSHYLYWYQQKPGSSPKLLIYSTSNLASGVPARFSGSGSGTSYTLTISSLEAEDAASYFCHQWSHHPPTFGSGTKLEIK

SEQ ID NO: 777 - protein, 108 aa, Artificial Sequence
  source: /note="Description of Artificial Sequence: Synthetic polypeptide"
  source: /note="Light Chain Combinations of P3D12 IgG histidine scanning variant #81"
QIVLTQSPAILSLSPGERATLSCSASSSVTSHYLYWYQQKPGSSPKLLIYSTSNLASGVPARFSGSGSGTSYTLTISSLEAEDAASYFCHQWSHYHPTFGSGTKLEIK

SEQ ID NO: 778 - protein, 108 aa, Artificial Sequence
  source: /note="Description of Artificial Sequence: Synthetic polypeptide"
  source: /note="Light Chain Combinations of P3D12 IgG histidine scanning variant #82"
QIVLTQSPAILSLSPGERATLSCSASSSVTSHYLYWYQQKPGSSPKLLIYSTSNLASGVPARFSGSGSGTSYTLTISSLEAEDAASYFCHQWSSHHPTFGSGTKLEIK

SEQ ID NO: 779 - protein, 108 aa, Artificial Sequence
  source: /note="Description of Artificial Sequence: Synthetic polypeptide"
  source: /note="Light Chain Combinations of P3D12 IgG histidine scanning variant #83"
QIVLTQSPAILSLSPGERATLSCSASSSVTSNYLHWYQQKPGSSPKLLIYSTSNLASGVPARFSGSGSGTSYTLTISSLEAEDAASYFCHQHSHYPPTFGSGTKLEIK

SEQ ID NO: 780 - protein, 108 aa, Artificial Sequence
  source: /note="Description of Artificial Sequence: Synthetic polypeptide"
  source: /note="Light Chain Combinations of P3D12 IgG histidine scanning variant #84"
QIVLTQSPAILSLSPGERATLSCSASSSVTSNYLHWYQQKPGSSPKLLIYSTSNLASGVPARFSGSGSGTSYTLTISSLEAEDAASYFCHQHSSHPPTFGSGTKLEIK

SEQ ID NO: 781 - protein, 108 aa, Artificial Sequence
  source: /note="Description of Artificial Sequence: Synthetic polypeptide"
  source: /note="Light Chain Combinations of P3D12 IgG histidine scanning variant #85"
QIVLTQSPAILSLSPGERATLSCSASSSVTSNYLHWYQQKPGSSPKLLIYSTSNLASGVPARFSGSGSGTSYTLTISSLEAEDAASYFCHQHSSYHPTFGSGTKLEIK

SEQ ID NO: 782 - protein, 108 aa, Artificial Sequence
  source: /note="Description of Artificial Sequence: Synthetic polypeptide"
  source: /note="Light Chain Combinations of P3D12 IgG histidine scanning variant #86"
QIVLTQSPAILSLSPGERATLSCSASSSVTSNYLYWYQQKPGSSPKLLIYSTSNLASGVPARFSGSGSGTSYTLTISSLEAEDAASYFCHQHSHHPPTFGSGTKLEIK

SEQ ID NO: 783 - protein, 108 aa, Artificial Sequence
  source: /note="Description of Artificial Sequence: Synthetic polypeptide"
  source: /note="Light Chain Combinations of P3D12 IgG histidine scanning variant #87"
QIVLTQSPAILSLSPGERATLSCSASSSVTSNYLYWYQQKPGSSPKLLIYSTSNLASGVPARFSGSGSGTSYTLTISSLEAEDAASYFCHQHSHYHPTFGSGTKLEIK

SEQ ID NO: 784 - protein, 108 aa, Artificial Sequence
  source: /note="Description of Artificial Sequence: Synthetic polypeptide"
  source: /note="Light Chain Combinations of P3D12 IgG histidine scanning variant #88"
QIVLTQSPAILSLSPGERATLSCSASSSVTSNYLYWYQQKPGSSPKLLIYSTSNLASGVPARFSGSGSGTSYTLTISSLEAEDAASYFCHQHSSHHPTFGSGTKLEIK

SEQ ID NO: 785 - protein, 108 aa, Artificial Sequence
  source: /note="Description of Artificial Sequence: Synthetic polypeptide"
  source: /note="Light Chain Combinations of P3D12 IgG histidine scanning variant #89"
QIVLTQSPAILSLSPGERATLSCSASSSVTSNYLHWYQQKPGSSPKLLIYSTSNLASGVPARFSGSGSGTSYTLTISSLEAEDAASYFCHQWSHYPPHFGSGTKLEIK

SEQ ID NO: 786 - protein, 108 aa, Artificial Sequence
  source: /note="Description of Artificial Sequence: Synthetic polypeptide"
  source: /note="Light Chain Combinations of P3D12 IgG histidine scanning variant #90"
QIVLTQSPAILSLSPGERATLSCSASSSVTSNYLHWYQQKPGSSPKLLIYSTSNLASGVPARFSGSGSGTSYTLTISSLEAEDAASYFCHQWSSHPPHFGSGTKLEIK

SEQ ID NO: 787 - protein, 108 aa, Artificial Sequence
  source: /note="Description of Artificial Sequence: Synthetic polypeptide"
  source: /note="Light Chain Combinations of P3D12 IgG histidine scanning variant #91"
QIVLTQSPAILSLSPGERATLSCSASSSVTSNYLHWYQQKPGSSPKLLIYSTSNLASGVPARFSGSGSGTSYTLTISSLEAEDAASYFCHQWSSYHPHFGSGTKLEIK

SEQ ID NO: 788 - protein, 108 aa, Artificial Sequence
  source: /note="Description of Artificial Sequence: Synthetic polypeptide"
  source: /note="Light Chain Combinations of P3D12 IgG histidine scanning variant #92"
QIVLTQSPAILSLSPGERATLSCSASSSVTSNYLYWYQQKPGSSPKLLIYSTSNLASGVPARFSGSGSGTSYTLTISSLEAEDAASYFCHQWSHHPPHFGSGTKLEIK

SEQ ID NO: 789 - protein, 108 aa, Artificial Sequence
  source: /note="Description of Artificial Sequence: Synthetic polypeptide"
  source: /note="Light Chain Combinations of P3D12 IgG histidine scanning variant #93"
QIVLTQSPAILSLSPGERATLSCSASSSVTSNYLYWYQQKPGSSPKLLIYSTSNLASGVPARFSGSGSGTSYTLTISSLEAEDAASYFCHQWSHYHPHFGSGTKLEIK

SEQ ID NO: 790 - protein, 108 aa, Artificial Sequence
  source: /note="Description of Artificial Sequence: Synthetic polypeptide"
  source: /note="Light Chain Combinations of P3D12 IgG histidine scanning variant #94"
QIVLTQSPAILSLSPGERATLSCSASSSVTSNYLYWYQQKPGSSPKLLIYSTSNLASGVPARFSGSGSGTSYTLTISSLEAEDAASYFCHQWSSHHPHFGSGTKLEIK

What is claimed is:

1. A pharmaceutical composition comprising an effective amount of an antigen-binding protein construct (ABPC) comprising:
a first antigen-binding domain that is capable of specifically binding MET or an epitope of MET presented on the surface of a target mammalian cell,
wherein:
(a) the dissociation rate of the first antigen-binding domain at a pH of about 4.0 to about 6.5 is faster than the dissociation rate at a pH of about 7.0 to about 8.0; or
(b) the dissociation constant (K_{D}) of the first antigen-binding domain at a pH of about 4.0 to about 6.5 is greater than the K_{D} at a pH of about 7.0 to about 8.0.

2. The pharmaceutical composition of claim 1, wherein the ABPC is degraded in the target mammalian cell following internalization of the ABPC by the target mammalian cell.

3. The pharmaceutical composition of claim 1 or 2, wherein the ABPC further comprises a conjugated toxin, radioisotope, drug, or small molecule.

4. A pharmaceutical composition comprising an effective amount of an antigen-binding protein construct (ABPC) comprising:
a first antigen-binding domain that is capable of specifically binding MET or an epitope of MET presented on the surface of a target mammalian cell; and
a conjugated toxin, radioisotope, drug, or small molecule,
wherein:
(a) the dissociation rate of the first antigen-binding domain at a pH of about 4.0 to about 6.5 is faster than the dissociation rate at a pH of about 7.0 to about 8.0; or
the dissociation constant (K_{D}) of the first antigen-binding domain at a pH of about 4.0 to about 6.5 is greater than the K_{D} at a pH of about 7.0 to about 8.0; and
(b) the composition provides for one or more of:
an increase in toxin liberation in the target mammalian cell as compared to a composition comprising the same amount of a control ABPC;
an increase in target mammalian cell killing as compared to a composition comprising the same amount of a control ABPC; and
an increase in endolysosomal delivery in the target mammalian cell as compared to a composition comprising the same amount of a control ABPC.

5. The pharmaceutical composition of claim 1 or 4, wherein the first antigen-binding domain comprises one of (a) through (d):
(a) a heavy chain variable domain of Telisotuzumab with one or more amino acids substituted with a histidine, wherein the heavy chain variable domain of Telisotuzumab comprises SEQ ID NO: 1; and/or
a light chain variable domain of Telisotuzumab with one or more amino acids substituted with a histidine, wherein the light chain variable domain of Telisotuzumab comprises SEQ ID NO: 2;
(b) a heavy chain variable domain of Emibetuzumab with one or more amino acids substituted with a histidine, wherein the heavy chain variable domain of Emibetuzumab comprises SEQ ID NO: 146; and/or
a light chain variable domain of Emibetuzumab with one or more amino acids substituted with a histidine, wherein the light chain variable domain of Emibetuzumab comprises SEQ ID NO: 147;
(c) a heavy chain variable domain of hucMET27Gv1.3 with one or more amino acids substituted with a histidine, wherein the heavy chain variable domain of hucMET27Gv1.3 comprises SEQ ID NO: 304; and/or
a light chain variable domain of hucMET27Gv1.3 with one or more amino acids substituted with a histidine, wherein the light chain variable domain of hucMET27Gv1.3 comprises SEQ ID NO: 305; and
(d) a heavy chain variable domain of P3D12 with one or more amino acids substituted with a histidine, wherein the heavy chain variable domain of P3D12 comprises SEQ ID NO: 502; and/or
a light chain variable domain of P3D12 with one or more amino acids substituted with a histidine, wherein the light chain variable domain of P3D12 comprises SEQ ID NO: 503.

6. The pharmaceutical composition of claim 1 or 4, wherein the first MET-binding domain comprises one of (a) through (d):
(a) a heavy chain variable domain comprising a CDR1, a CDR2, and a CDR3 of SEQ ID NOs: 3-5, respectively, with collectively a total of one or more amino acid positions in SEQ ID NOs: 3-5 substituted with a histidine; and/or
a light chain variable domain comprising a CDR1, a CDR2, and a CDR3 of SEQ ID NOs: 6-8, respectively, with collectively a total of one or more amino acid positions in SEQ ID NOs: 6-8 substituted with a histidine;
(b) a heavy chain variable domain comprising a CDR1, a CDR2, and a CDR3 of SEQ ID NOs: 148-150, respectively, with collectively a total of one or more amino acid positions in SEQ ID NOs: 148-150 substituted with a histidine; and/or
a light chain variable domain comprising a CDR1, a CDR2, and a CDR3 of SEQ ID NOs: 151-153, respectively, with collectively a total of one or more amino acid positions in SEQ ID NOs: 151-153 substituted with a histidine;
(c) a heavy chain variable domain comprising a CDR1, a CDR2, and a CDR3 of SEQ ID NOs: 306-308, respectively, with collectively a total of one or more amino acid positions in SEQ ID NOs: 306-308 substituted with a histidine; and/or
a light chain variable domain comprising a CDR1, a CDR2, and a CDR3 of SEQ ID NOs: 309-311, respectively, with collectively a total of one or more amino acid positions in SEQ ID NOs: 309-311 substituted with a histidine; and
(d) a heavy chain variable domain comprising a CDR1, a CDR2, and a CDR3 of SEQ ID NOs: 504-506, respectively, with collectively a total of one or more amino acid positions in SEQ ID NOs: 504-506 substituted with a histidine; and/or
a light chain variable domain comprising a CDR1, a CDR2, and a CDR3 of SEQ ID NOs: 507-509, respectively, with collectively a total of one or more amino acid positions in SEQ ID NOs: 507-509 substituted with a histidine.

7. The pharmaceutical composition of any one of claims 1 and 4-6, wherein the first antigen-binding domain comprises one of (a) through (d):
(a) a heavy chain variable domain that is at least 90% identical to SEQ ID NO: 1, wherein the heavy chain variable domain includes a histidine at one or more positions in SEQ ID NO: 1 selected from the group consisting of: 26, 27, 28, 29, 32, 97, 98, 99, 100, 101, 102, 103, and 107; and/or
a light chain variable domain that is at least 90% identical to SEQ ID NO: 2, wherein the light chain variable domain includes a histidine at one or more positions in SEQ ID NO: 2 selected from the group consisting of: 25, 28, 29, 30, 31, 32, 34, 35, 36, 37, 54, 55, 59, 60, 95, 99, and 101;
(b) a heavy chain variable domain that is at least 90% identical to SEQ ID NO: 146, wherein the heavy chain variable domain includes a histidine at one or more positions in SEQ ID NO: 146 selected from the group consisting of: 31, 50, 51, 52, 53, 54, 56, 57, 59, 98, 99, 100, and 103; and/or
a light chain variable domain that is at least 90% identical to SEQ ID NO: 147, wherein the light chain variable domain includes a histidine at one or more positions in SEQ ID NO: 147 selected from the group consisting of: 25, 26, 29, 32, 33, 51, 91, 92, 95, 96, and 97;
(c) a heavy chain variable domain that is at least 90% identical to SEQ ID NO: 304, wherein the heavy chain variable domain includes a histidine at one or more positions in SEQ ID NO: 304 selected from the group consisting of: 27, 34, 35, 50, 51, 52, 54, 55, 56, 57, 58, 59, 60, 61, 62, 63, 64, 65, 98, 99, 103, and 105; and/or
a light chain variable domain that is at least 90% identical to SEQ ID NO: 305, wherein the light chain variable domain includes a histidine at one or more positions in SEQ ID NO: 305 selected from the group consisting of 26, 30, 31, 34, 36, 54, 56, 57, 60, 93, 95, 99, and 101; and
(d) a heavy chain variable domain that is at least 90% identical to SEQ ID NO: 502, wherein the heavy chain variable domain includes a histidine at one or more positions in SEQ ID NO: 502 selected from the group consisting of: 27, 29, 30, 32, 33, 34, 50, 51, 52, 53, 57, 59, 98, 100, 101, 102, 103, 106, and 107; and/or
a light chain variable domain that is at least 90% identical to SEQ ID NO: 503, wherein the light chain variable domain includes a histidine at one or more positions in SEQ ID NO: 503 selected from the group consisting of: 25, 29, 31, 32, 33, 34, 35, 52, 55, 91, 92, 93, 94, 95, 96. 97, and 98.

8. The pharmaceutical composition of claim 1 or 4, wherein the first antigen-binding domain comprises one of (a) through (d):
(a) a light chain variable domain of SEQ ID NO: 2, SEQ ID NO: 52, SEQ ID NO: 55, SEQ ID NO: 56, SEQ ID NO: 57, SEQ ID NO: 58, SEQ ID NO: 59, SEQ ID NO: 61, SEQ ID NO: 62, SEQ ID NO: 63, SEQ ID NO: 64, SEQ ID NO: 65, SEQ ID NO: 66, SEQ ID NO: 67, SEQ ID NO: 71, SEQ ID NO: 72, SEQ ID NO: 75, SEQ ID NO: 79, SEQ ID NO: 81, SEQ ID NO: 131, SEQ ID NO: 132, SEQ ID NO: 133, SEQ ID NO: 134, SEQ ID NO: 135, SEQ ID NO: 136, SEQ ID NO: 137, SEQ ID NO: 138, SEQ ID NO: 139, or SEQ ID NO: 140, and/or
a heavy chain variable domain of SEQ ID NO: 1, SEQ ID NO: 13, SEQ ID NO: 14, SEQ ID NO: 15, SEQ ID NO: 16, SEQ ID NO: 19, SEQ ID NO: 40, SEQ ID NO: 41, SEQ ID NO: 42, SEQ ID NO: 43, SEQ ID NO: 44, SEQ ID NO: 45, SEQ ID NO: 46, SEQ ID NO: 50, SEQ ID NO: 82, SEQ ID NO: 83, SEQ ID NO: 84, SEQ ID NO: 86, SEQ ID NO: 87, SEQ ID NO: 89, SEQ ID NO: 90, SEQ ID NO: 94, or SEQ ID NO: 111,
wherein the first antigen-binding domain does not comprise (i) a light chain variable domain of SEQ ID NO: 2 and a heavy chain variable domain of SEQ ID NO: 1; (ii) a light chain variable domain of SEQ ID NO: 2 and heavy chain variable domain that is not one of SEQ ID NOs: 13-16, 19, 40-46, 50, 82-84, 86, 87, 89, 90, 94, and 111; or (iii) a heavy chain variable domain of SEQ ID NO: 1 and a light chain variable domain that is not one of SEQ ID NOs: 52, 55-59, 61-67, 71, 72, 75, 79, 81, and 131-140;
(b) a light chain variable domain of SEQ ID NO: 147, SEQ ID NO: 190, SEQ ID NO: 191, SEQ ID NO: 194, SEQ ID NO: 197, SEQ ID NO: 198, SEQ ID NO: 200, SEQ ID NO: 201, SEQ ID NO: 209, SEQ ID NO: 210, SEQ ID NO: 213, SEQ ID NO: 214, SEQ ID NO: 215, SEQ ID NO: 284, SEQ ID NO: 285, SEQ ID NO: 286, SEQ ID NO: 287, SEQ ID NO: 288, SEQ ID NO: 289, SEQ ID NO: 290, SEQ ID NO: 291, SEQ ID NO: 292, SEQ ID NO: 293, SEQ ID NO: 294, SEQ ID NO: 295, SEQ ID NO: 296, SEQ ID NO: 297, SEQ ID NO: 298, SEQ ID NO: 300, or SEQ ID NO: 301, and/or
a heavy chain variable domain of SEQ ID NO: 146, SEQ ID NO: 159, SEQ ID NO: 164, SEQ ID NO: 165, SEQ ID NO: 166, SEQ ID NO: 167, SEQ ID NO: 168, SEQ ID NO: 170, SEQ ID NO: 171, SEQ ID NO: 173, SEQ ID NO: 182, SEQ ID NO: 183, SEQ ID NO: 184, SEQ ID NO: 187, SEQ ID NO: 217, SEQ ID NO: 218, SEQ ID NO: 219, SEQ ID NO: 220, SEQ ID NO: 221, SEQ ID NO: 222, SEQ ID NO: 223, SEQ ID NO: 224, SEQ ID NO: 225, SEQ ID NO: 226, SEQ ID NO: 227, SEQ ID NO: 228, SEQ ID NO: 230, SEQ ID NO: 231, SEQ ID NO: 232, SEQ ID NO: 233, SEQ ID NO: 234, SEQ ID NO: 235, or SEQ ID NO: 236,
wherein the first antigen-binding domain does not comprise (i) a light chain variable domain of SEQ ID NO: 147 and a heavy chain variable domain of SEQ ID NO: 146; (ii) a light chain variable domain of SEQ ID NO: 147 and heavy chain variable domain that is not one of SEQ ID NOs: 159, 164-168, 170, 171, 173, 182-184, 187, 217-228, and 230-236; or (iii) a heavy chain variable domain of SEQ ID NO: 146 and a light chain variable domain that is not one of SEQ ID NOs: 190, 191, 194, 197, 198, 200, 201, 209, 210, 213-215, 284-298, 300 and 301;
(c) a light chain variable domain of SEQ ID NO: 305, SEQ ID NO: 352, SEQ ID NO: 356, SEQ ID NO: 357, SEQ ID NO: 360, SEQ ID NO: 362, SEQ ID NO: 364, SEQ ID NO: 365, SEQ ID NO: 367, SEQ ID NO: 368, SEQ ID NO: 371, SEQ ID NO: 372, SEQ ID NO: 374, SEQ ID NO: 378, SEQ ID NO: 380, SEQ ID NO: 428, SEQ ID NO: 429, SEQ ID NO: 430, SEQ ID NO: 431, SEQ ID NO: 432, SEQ ID NO: 433, SEQ ID NO: 434, SEQ ID NO: 435, SEQ ID NO: 436, SEQ ID NO: 437, SEQ ID NO: 438, SEQ ID NO: 439, SEQ ID NO: 440, SEQ ID NO: 441, SEQ ID NO: 442, SEQ ID NO: 443, SEQ ID NO: 444, SEQ ID NO: 445, SEQ ID NO: 446, SEQ ID NO: 450, SEQ ID NO: 451, SEQ ID NO: 453, SEQ ID NO: 457, SEQ ID NO: 462, SEQ ID NO: 463, SEQ ID NO: 465, SEQ ID NO: 470, SEQ ID NO: 472, SEQ ID NO: 473, SEQ ID NO: 474, SEQ ID NO: 476, SEQ ID NO: 479, SEQ ID NO: 482, SEQ ID NO: 483, SEQ ID NO: 485, SEQ ID NO: 490, SEQ ID NO: 492, SEQ ID NO: 494, SEQ ID NO: 496, or SEQ ID NO: 499, and/or
a heavy chain variable domain of SEQ ID NO: 304, SEQ ID NO: 313, SEQ ID NO: 320, SEQ ID NO: 321, SEQ ID NO: 322, SEQ ID NO: 323, SEQ ID NO: 324, SEQ ID NO: 326, SEQ ID NO: 327, SEQ ID NO: 328, SEQ ID NO: 329, SEQ ID NO: 330, SEQ ID NO: 331, SEQ ID NO: 332, SEQ ID NO: 333, SEQ ID NO: 334, SEQ ID NO: 335, SEQ ID NO: 336, SEQ ID NO: 337, SEQ ID NO: 340, SEQ ID NO: 341, SEQ ID NO: 345, SEQ ID NO: 347, SEQ ID NO: 381, SEQ ID NO: 382, SEQ ID NO: 383, SEQ ID NO: 384, SEQ ID NO: 385, SEQ ID NO: 386, SEQ ID NO: 387, SEQ ID NO: 388, SEQ ID NO: 389, SEQ ID NO: 390, SEQ ID NO: 392, SEQ ID NO: 393, SEQ ID NO: 395, SEQ ID NO: 396, SEQ ID NO: 397, SEQ ID NO: 398, SEQ ID NO: 399, or SEQ ID NO: 400,
wherein the first antigen-binding domain does not comprise (i) a light chain variable domain of SEQ ID NO: 305 and a heavy chain variable domain of SEQ ID NO: 304; (ii) a light chain variable domain of SEQ ID NO: 305 and heavy chain variable domain that is not one of SEQ ID NOs: 313, 320-324, 326-337, 340, 341, 345, 347, 381-390, 392, 393, and 395-400; or (iii) a heavy chain variable domain of SEQ ID NO: 304 and a light chain variable domain that is not one of SEQ ID NOs: 352, 356, 357, 360, 362, 364, 365, 367, 368, 371, 372, 374, 378, 380, 428-446, 450, 451, 453, 457, 462, 463, 465, 470, 472-474, 476, 479, 482, 483, 485, 490, 492, 494, 496, and 499; and
(d) a light chain variable domain of SEQ ID NO: 503, SEQ ID NO: 550, SEQ ID NO: 554, SEQ ID NO: 556, SEQ ID NO: 557, SEQ ID NO: 558, SEQ ID NO: 559, SEQ ID NO: 560, SEQ ID NO: 562, SEQ ID NO: 565, SEQ ID NO: 569, SEQ ID NO: 570, SEQ ID NO: 571, SEQ ID NO: 572, SEQ ID NO: 573, SEQ ID NO: 574, SEQ ID NO: 575, SEQ ID NO: 576, SEQ ID NO: 697, SEQ ID NO: 698, SEQ ID NO: 699, SEQ ID NO: 700, SEQ ID NO: 701, SEQ ID NO: 702, SEQ ID NO: 703, SEQ ID NO: 704, SEQ ID NO: 705, SEQ ID NO: 706, SEQ ID NO: 707, SEQ ID NO: 708, SEQ ID NO: 709, SEQ ID NO: 710, SEQ ID NO: 711, SEQ ID NO: 712, SEQ ID NO: 713, or SEQ ID NO: 732, and/or
a heavy chain variable domain of SEQ ID NO: 502, SEQ ID NO: 511, SEQ ID NO: 513, SEQ ID NO: 514, SEQ ID NO: 516, SEQ ID NO: 517, SEQ ID NO: 518, SEQ ID NO: 519, SEQ ID NO: 520, SEQ ID NO: 521, SEQ ID NO: 522, SEQ ID NO: 523, SEQ ID NO: 527, SEQ ID NO: 529, SEQ ID NO: 538, SEQ ID NO: 540, SEQ ID NO: 541, SEQ ID NO: 542, SEQ ID NO: 543, SEQ ID NO: 546, SEQ ID NO: 547, SEQ ID NO: 578, SEQ ID NO: 579, SEQ ID NO: 580, SEQ ID NO: 581, SEQ ID NO: 582, SEQ ID NO: 583, SEQ ID NO: 584, SEQ ID NO: 585, SEQ ID NO: 586, SEQ ID NO: 587, SEQ ID NO: 588, SEQ ID NO: 589, SEQ ID NO: 590, SEQ ID NO: 591, SEQ ID NO: 592, SEQ ID NO: 593, SEQ ID NO: 594, SEQ ID NO: 595, SEQ ID NO: 596, SEQ ID NO: 597, SEQ ID NO: 606, SEQ ID NO: 621, SEQ ID NO: 659, or SEQ ID NO: 676,
wherein the first antigen-binding domain does not comprise (i) a light chain variable domain of SEQ ID NO: 503 and a heavy chain variable domain of SEQ ID NO: 502; or (ii) a light chain variable domain of SEQ ID NO: 503 and heavy chain variable domain that is not one of SEQ ID NOs: 511, 513, 514, 516-523, 527, 529, 538, 540-543, 546, 547, 578-597, 606, 621, 659, and 676; or (iii) a heavy chain variable domain of SEQ ID NO: 502 and light chain variable domain that is not one of SEQ ID NOs: 550, 554, 556-560, 562, 565, 569, 570-576, 697-713, and 732.

9. The pharmaceutical composition of any one of claims 1-8, wherein the composition provides for:
an increase in toxin liberation in the target mammalian cell as compared to a composition comprising the same amount of a control ABPC; and/or
an increase in target mammalian cell killing as compared to a composition comprising the same amount of a control ABPC.

10. The pharmaceutical composition of any one of claims 1-9, wherein the composition provides for an increase in endolysosomal delivery in the target mammalian cell as compared to a composition comprising the same amount of a control ABPC.

11. The pharmaceutical composition of any one of claims 1-10, wherein the composition:
results in a less of a reduction in the level of MET presented on the surface of the target mammalian cell as compared to a composition comprising the same amount of a control ABPC; or
does not result in a detectable reduction in the level of MET presented on the surface of the target mammalian cell.

12. The pharmaceutical composition of any one of claims 1-11, wherein the target mammalian cell is a cancer cell.

13. The pharmaceutical composition of any one of claims 1-12, wherein the ABPC is cytotoxic or cytostatic to the target mammalian cell.

14. The pharmaceutical composition of any one of claims 1-13, wherein the ABPC is:
cross-reactive with a non-human primate MET and human MET; or
cross-reactive with a non-human primate MET, a human MET, and one or both of rat MET and a mouse MET.

15. The pharmaceutical composition of any one of claims 1-14, wherein the ABPC comprises a single polypeptide.

16. The pharmaceutical composition of claim 15, wherein the antigen-binding domain is selected from the group consisting of: a VH domain, a VHH domain, a VNAR domain, and a scFv.

17. The pharmaceutical composition of any one of claims 1-14, wherein the ABPC comprises two or more polypeptides.

18. The pharmaceutical composition of claim 17, wherein the ABPC is an antibody.

19. The pharmaceutical composition of any of claims 1-18, wherein the half-life of the ABPC in vivo is decreased as compared to the half-life of a control ABPC in vivo.

20. The pharmaceutical composition of any one of claims 1-19, wherein the ABPC further comprises a second antigen-binding domain.

21. An antigen-binding protein construct (ABPC) comprising:
a first antigen-binding domain that is capable of specifically binding MET or an epitope of MET presented on the surface of a target mammalian cell,
wherein:
(a) the dissociation rate of the first antigen-binding domain at a pH of about 4.0 to about 6.5 is faster than the dissociation rate at a pH of about 7.0 to about 8.0; or
(b) the dissociation constant (K_{D}) of the first antigen-binding domain at a pH of about 4.0 to about 6.5 is greater than the K_{D} at a pH of about 7.0 to about 8.0.

22. The ABPC of claim 21, wherein the ABPC is degraded in the target mammalian cell following internalization of the ABPC by the target mammalian cell.

23. The ABPC of claim 21 or 22, wherein the ABPC further comprises a conjugated toxin, radioisotope, drug, or small molecule.

24. An antigen-binding protein construct (ABPC) comprising:
a first antigen-binding domain that is capable of specifically binding MET or an epitope of MET presented on the surface of a target mammalian cell; and
a conjugated toxin, radioisotope, drug, or small molecule,
wherein:
(a) the dissociation rate of the first antigen-binding domain at a pH of about 4.0 to about 6.5 is faster than the dissociation rate at a pH of about 7.0 to about 8.0; or
the dissociation constant (K_{D}) of the first antigen-binding domain at a pH of about 4.0 to about 6.5 is greater than the K_{D} at a pH of about 7.0 to about 8.0; and
(b) the composition provides for one or more of:
an increase in toxin liberation in the target mammalian cell as compared to a composition comprising the same amount of a control ABPC;
an increase in target mammalian cell killing as compared to a composition comprising the same amount of a control ABPC; and
an increase in endolysosomal delivery in the target mammalian cell as compared to a composition comprising the same amount of a control ABPC.

25. The ABPC of claim 21 or 24, wherein the first antigen-binding domain comprises one of (a) through (d):
(a) a heavy chain variable domain of Telisotuzumab with one or more amino acids substituted with a histidine, wherein the heavy chain variable domain of Telisotuzumab comprises SEQ ID NO: 1; and/or
a light chain variable domain of Telisotuzumab with one or more amino acids substituted with a histidine, wherein the light chain variable domain of Telisotuzumab comprises SEQ ID NO: 2;
(b) a heavy chain variable domain of Emibetuzumab with one or more amino acids substituted with a histidine, wherein the heavy chain variable domain of Emibetuzumab comprises SEQ ID NO: 146; and/or
a light chain variable domain of Emibetuzumab with one or more amino acids substituted with a histidine, wherein the light chain variable domain of Emibetuzumab comprises SEQ ID NO: 147;
(c) a heavy chain variable domain of hucMET27Gv1.3 with one or more amino acids substituted with a histidine, wherein the heavy chain variable domain of hucMET27Gv1.3 comprises SEQ ID NO: 304; and/or
a light chain variable domain of hucMET27Gv1.3 with one or more amino acids substituted with a histidine, wherein the light chain variable domain of hucMET27Gv1.3 comprises SEQ ID NO: 305; and
(d) a heavy chain variable domain of P3D12 with one or more amino acids substituted with a histidine, wherein the heavy chain variable domain of P3D12 comprises SEQ ID NO: 502; and/or
a light chain variable domain of P3D12 with one or more amino acids substituted with a histidine, wherein the light chain variable domain of P3D12 comprises SEQ ID NO: 503.

26. The ABPC of claim 21 or 24, wherein the first MET-binding domain comprises one of (a) through (d):
(a) a heavy chain variable domain comprising a CDR1, a CDR2, and a CDR3 of SEQ ID NOs: 3-5, respectively, with collectively a total of one or more amino acid positions in SEQ ID NOs: 3-5 substituted with a histidine; and/or
a light chain variable domain comprising a CDR1, a CDR2, and a CDR3 of SEQ ID NOs: 6-8, respectively, with collectively a total of one or more amino acid positions in SEQ ID NOs: 6-8 substituted with a histidine;
(b) a heavy chain variable domain comprising a CDR1, a CDR2, and a CDR3 of SEQ ID NOs: 148-150, respectively, with collectively a total of one or more amino acid positions in SEQ ID NOs: 148-150 substituted with a histidine; and/or
a light chain variable domain comprising a CDR1, a CDR2, and a CDR3 of SEQ ID NOs: 151-153, respectively, with collectively a total of one or more amino acid positions in SEQ ID NOs: 151-153 substituted with a histidine;
(c) a heavy chain variable domain comprising a CDR1, a CDR2, and a CDR3 of SEQ ID NOs: 306-308, respectively, with collectively a total of one or more amino acid positions in SEQ ID NOs: 306-308 substituted with a histidine; and/or
a light chain variable domain comprising a CDR1, a CDR2, and a CDR3 of SEQ ID NOs: 309-311, respectively, with collectively a total of one or more amino acid positions in SEQ ID NOs: 309-311 substituted with a histidine; and
(d) a heavy chain variable domain comprising a CDR1, a CDR2, and a CDR3 of SEQ ID NOs: 504-506, respectively, with collectively a total of one or more amino acid positions in SEQ ID NOs: 504-506 substituted with a histidine; and/or
a light chain variable domain comprising a CDR1, a CDR2, and a CDR3 of SEQ ID NOs: 507-509, respectively, with collectively a total of one or more amino acid positions in SEQ ID NOs: 507-509 substituted with a histidine.

27. The ABPC of any one of claims 21 and 24-26, wherein the first antigen-binding domain comprises one of (a) through (d):
(a) a heavy chain variable domain that is at least 90% identical to SEQ ID NO: 1, wherein the heavy chain variable domain includes a histidine at one or more positions in SEQ ID NO: 1 selected from the group consisting of: 26, 27, 28, 29, 32, 97, 98, 99, 100, 101, 102, 103, and 107; and/or
a light chain variable domain that is at least 90% identical to SEQ ID NO: 2, wherein the light chain variable domain includes a histidine at one or more positions in SEQ ID NO: 2 selected from the group consisting of: 25, 28, 29, 30, 31, 32, 34, 35, 36, 37, 54, 55, 59, 60, 95, 99, and 101;
(b) a heavy chain variable domain that is at least 90% identical to SEQ ID NO: 146, wherein the heavy chain variable domain includes a histidine at one or more positions in SEQ ID NO: 146 selected from the group consisting of: 31, 50, 51, 52, 53, 54, 56, 57, 59, 98, 99, 100, and 103; and/or
a light chain variable domain that is at least 90% identical to SEQ ID NO: 147, wherein the light chain variable domain includes a histidine at one or more positions in SEQ ID NO: 147 selected from the group consisting of: 25, 26, 29, 32, 33, 51, 91, 92, 95, 96, and 97;
(c) a heavy chain variable domain that is at least 90% identical to SEQ ID NO: 304, wherein the heavy chain variable domain includes a histidine at one or more positions in SEQ ID NO: 304 selected from the group consisting of: 27, 34, 35, 50, 51, 52, 54, 55, 56, 57, 58, 59, 60, 61, 62, 63, 64, 65, 98, 99, 103, and 105; and/or
a light chain variable domain that is at least 90% identical to SEQ ID NO: 305, wherein the light chain variable domain includes a histidine at one or more positions in SEQ ID NO: 305 selected from the group consisting of 26, 30, 31, 34, 36, 54, 56, 57, 60, 93, 95, 99, and 101; and
(d) a heavy chain variable domain that is at least 90% identical to SEQ ID NO: 502, wherein the heavy chain variable domain includes a histidine at one or more positions in SEQ ID NO: 502 selected from the group consisting of: 27, 29, 30, 32, 33, 34, 50, 51, 52, 53, 57, 59, 98, 100, 101, 102, 103, 106, and 107; and/or
a light chain variable domain that is at least 90% identical to SEQ ID NO: 503, wherein the light chain variable domain includes a histidine at one or more positions in SEQ ID NO: 503 selected from the group consisting of: 25, 29, 31, 32, 33, 34, 35, 52, 55, 91, 92, 93, 94, 95, 96. 97, and 98.

28. The ABPC of claim 21 or 24, wherein the first antigen-binding domain comprises one of (a) through (d):
(a) a light chain variable domain of SEQ ID NO: 2, SEQ ID NO: 52, SEQ ID NO: 55, SEQ ID NO: 56, SEQ ID NO: 57, SEQ ID NO: 58, SEQ ID NO: 59, SEQ ID NO: 61, SEQ ID NO: 62, SEQ ID NO: 63, SEQ ID NO: 64, SEQ ID NO: 65, SEQ ID NO: 66, SEQ ID NO: 67, SEQ ID NO: 71, SEQ ID NO: 72, SEQ ID NO: 75, SEQ ID NO: 79, SEQ ID NO: 81, SEQ ID NO: 131, SEQ ID NO: 132, SEQ ID NO: 133, SEQ ID NO: 134, SEQ ID NO: 135, SEQ ID NO: 136, SEQ ID NO: 137, SEQ ID NO: 138, SEQ ID NO: 139, or SEQ ID NO: 140, and/or
a heavy chain variable domain of SEQ ID NO: 1, SEQ ID NO: 13, SEQ ID NO: 14, SEQ ID NO: 15, SEQ ID NO: 16, SEQ ID NO: 19, SEQ ID NO: 40, SEQ ID NO: 41, SEQ ID NO: 42, SEQ ID NO: 43, SEQ ID NO: 44, SEQ ID NO: 45, SEQ ID NO: 46, SEQ ID NO: 50, SEQ ID NO: 82, SEQ ID NO: 83, SEQ ID NO: 84, SEQ ID NO: 86, SEQ ID NO: 87, SEQ ID NO: 89, SEQ ID NO: 90, SEQ ID NO: 94, or SEQ ID NO: 111,
wherein the first antigen-binding domain does not comprise (i) a light chain variable domain of SEQ ID NO: 2 and a heavy chain variable domain of SEQ ID NO: 1; (ii) a light chain variable domain of SEQ ID NO: 2 and heavy chain variable domain that is not one of SEQ ID NOs: 13-16, 19, 40-46, 50, 82-84, 86, 87, 89, 90, 94, and 111; or (iii) a heavy chain variable domain of SEQ ID NO: 1 and a light chain variable domain that is not one of SEQ ID NOs: 52, 55-59, 61-67, 71, 72, 75, 79, 81, and 131-140;
(b) a light chain variable domain of SEQ ID NO: 147, SEQ ID NO: 190, SEQ ID NO: 191, SEQ ID NO: 194, SEQ ID NO: 197, SEQ ID NO: 198, SEQ ID NO: 200, SEQ ID NO: 201, SEQ ID NO: 209, SEQ ID NO: 210, SEQ ID NO: 213, SEQ ID NO: 214, SEQ ID NO: 215, SEQ ID NO: 284, SEQ ID NO: 285, SEQ ID NO: 286, SEQ ID NO: 287, SEQ ID NO: 288, SEQ ID NO: 289, SEQ ID NO: 290, SEQ ID NO: 291, SEQ ID NO: 292, SEQ ID NO: 293, SEQ ID NO: 294, SEQ ID NO: 295, SEQ ID NO: 296, SEQ ID NO: 297, SEQ ID NO: 298, SEQ ID NO: 300, or SEQ ID NO: 301, and/or
a heavy chain variable domain of SEQ ID NO: 146, SEQ ID NO: 159, SEQ ID NO: 164, SEQ ID NO: 165, SEQ ID NO: 166, SEQ ID NO: 167, SEQ ID NO: 168, SEQ ID NO: 170, SEQ ID NO: 171, SEQ ID NO: 173, SEQ ID NO: 182, SEQ ID NO: 183, SEQ ID NO: 184, SEQ ID NO: 187, SEQ ID NO: 217, SEQ ID NO: 218, SEQ ID NO: 219, SEQ ID NO: 220, SEQ ID NO: 221, SEQ ID NO: 222, SEQ ID NO: 223, SEQ ID NO: 224, SEQ ID NO: 225, SEQ ID NO: 226, SEQ ID NO: 227, SEQ ID NO: 228, SEQ ID NO: 230, SEQ ID NO: 231, SEQ ID NO: 232, SEQ ID NO: 233, SEQ ID NO: 234, SEQ ID NO: 235, or SEQ ID NO: 236,
wherein the first antigen-binding domain does not comprise (i) a light chain variable domain of SEQ ID NO: 147 and a heavy chain variable domain of SEQ ID NO: 146; (ii) a light chain variable domain of SEQ ID NO: 147 and heavy chain variable domain that is not one of SEQ ID NOs: 159, 164-168, 170, 171, 173, 182-184, 187, 217-228, and 230-236; or (iii) a heavy chain variable domain of SEQ ID NO: 146 and a light chain variable domain that is not one of SEQ ID NOs: 190, 191, 194, 197, 198, 200, 201, 209, 210, 213-215, 284-298, 300 and 301;
(c) a light chain variable domain of SEQ ID NO: 305, SEQ ID NO: 352, SEQ ID NO: 356, SEQ ID NO: 357, SEQ ID NO: 360, SEQ ID NO: 362, SEQ ID NO: 364, SEQ ID NO: 365, SEQ ID NO: 367, SEQ ID NO: 368, SEQ ID NO: 371, SEQ ID NO: 372, SEQ ID NO: 374, SEQ ID NO: 378, SEQ ID NO: 380, SEQ ID NO: 428, SEQ ID NO: 429, SEQ ID NO: 430, SEQ ID NO: 431, SEQ ID NO: 432, SEQ ID NO: 433, SEQ ID NO: 434, SEQ ID NO: 435, SEQ ID NO: 436, SEQ ID NO: 437, SEQ ID NO: 438, SEQ ID NO: 439, SEQ ID NO: 440, SEQ ID NO: 441, SEQ ID NO: 442, SEQ ID NO: 443, SEQ ID NO: 444, SEQ ID NO: 445, SEQ ID NO: 446, SEQ ID NO: 450, SEQ ID NO: 451, SEQ ID NO: 453, SEQ ID NO: 457, SEQ ID NO: 462, SEQ ID NO: 463, SEQ ID NO: 465, SEQ ID NO: 470, SEQ ID NO: 472, SEQ ID NO: 473, SEQ ID NO: 474, SEQ ID NO: 476, SEQ ID NO: 479, SEQ ID NO: 482, SEQ ID NO: 483, SEQ ID NO: 485, SEQ ID NO: 490, SEQ ID NO: 492, SEQ ID NO: 494, SEQ ID NO: 496, or SEQ ID NO: 499, and/or
a heavy chain variable domain of SEQ ID NO: 304, SEQ ID NO: 313, SEQ ID NO: 320, SEQ ID NO: 321, SEQ ID NO: 322, SEQ ID NO: 323, SEQ ID NO: 324, SEQ ID NO: 326, SEQ ID NO: 327, SEQ ID NO: 328, SEQ ID NO: 329, SEQ ID NO: 330, SEQ ID NO: 331, SEQ ID NO: 332, SEQ ID NO: 333, SEQ ID NO: 334, SEQ ID NO: 335, SEQ ID NO: 336, SEQ ID NO: 337, SEQ ID NO: 340, SEQ ID NO: 341, SEQ ID NO: 345, SEQ ID NO: 347, SEQ ID NO: 381, SEQ ID NO: 382, SEQ ID NO: 383, SEQ ID NO: 384, SEQ ID NO: 385, SEQ ID NO: 386, SEQ ID NO: 387, SEQ ID NO: 388, SEQ ID NO: 389, SEQ ID NO: 390, SEQ ID NO: 392, SEQ ID NO: 393, SEQ ID NO: 395, SEQ ID NO: 396, SEQ ID NO: 397, SEQ ID NO: 398, SEQ ID NO: 399, or SEQ ID NO: 400,
wherein the first antigen-binding domain does not comprise (i) a light chain variable domain of SEQ ID NO: 305 and a heavy chain variable domain of SEQ ID NO: 304; (ii) a light chain variable domain of SEQ ID NO: 305 and heavy chain variable domain that is not one of SEQ ID NOs: 313, 320-324, 326-337, 340, 341, 345, 347, 381-390, 392, 393, and 395-400; or (iii) a heavy chain variable domain of SEQ ID NO: 304 and a light chain variable domain that is not one of SEQ ID NOs: 352, 356, 357, 360, 362, 364, 365, 367, 368, 371, 372, 374, 378, 380, 428-446, 450, 451, 453, 457, 462, 463, 465, 470, 472-474, 476, 479, 482, 483, 485, 490, 492, 494, 496, and 499; and
(d) a light chain variable domain of SEQ ID NO: 503, SEQ ID NO: 550, SEQ ID NO: 554, SEQ ID NO: 556, SEQ ID NO: 557, SEQ ID NO: 558, SEQ ID NO: 559, SEQ ID NO: 560, SEQ ID NO: 562, SEQ ID NO: 565, SEQ ID NO: 569, SEQ ID NO: 570, SEQ ID NO: 571, SEQ ID NO: 572, SEQ ID NO: 573, SEQ ID NO: 574, SEQ ID NO: 575, SEQ ID NO: 576, SEQ ID NO: 697, SEQ ID NO: 698, SEQ ID NO: 699, SEQ ID NO: 700, SEQ ID NO: 701, SEQ ID NO: 702, SEQ ID NO: 703, SEQ ID NO: 704, SEQ ID NO: 705, SEQ ID NO: 706, SEQ ID NO: 707, SEQ ID NO: 708, SEQ ID NO: 709, SEQ ID NO: 710, SEQ ID NO: 711, SEQ ID NO: 712, SEQ ID NO: 713, or SEQ ID NO: 732, and/or
a heavy chain variable domain of SEQ ID NO: 502, SEQ ID NO: 511, SEQ ID NO: 513, SEQ ID NO: 514, SEQ ID NO: 516, SEQ ID NO: 517, SEQ ID NO: 518, SEQ ID NO: 519, SEQ ID NO: 520, SEQ ID NO: 521, SEQ ID NO: 522, SEQ ID NO: 523, SEQ ID NO: 527, SEQ ID NO: 529, SEQ ID NO: 538, SEQ ID NO: 540, SEQ ID NO: 541, SEQ ID NO: 542, SEQ ID NO: 543, SEQ ID NO: 546, SEQ ID NO: 547, SEQ ID NO: 578, SEQ ID NO: 579, SEQ ID NO: 580, SEQ ID NO: 581, SEQ ID NO: 582, SEQ ID NO: 583, SEQ ID NO: 584, SEQ ID NO: 585, SEQ ID NO: 586, SEQ ID NO: 587, SEQ ID NO: 588, SEQ ID NO: 589, SEQ ID NO: 590, SEQ ID NO: 591, SEQ ID NO: 592, SEQ ID NO: 593, SEQ ID NO: 594, SEQ ID NO: 595, SEQ ID NO: 596, SEQ ID NO: 597, SEQ ID NO: 606, SEQ ID NO: 621, SEQ ID NO: 659, or SEQ ID NO: 676,
wherein the first antigen-binding domain does not comprise (i) a light chain variable domain of SEQ ID NO: 503 and a heavy chain variable domain of SEQ ID NO: 502; or (ii) a light chain variable domain of SEQ ID NO: 503 and heavy chain variable domain that is not one of SEQ ID NOs: 511, 513, 514, 516-523, 527, 529, 538, 540-543, 546, 547, 578-597, 606, 621, 659, and 676; or (iii) a heavy chain variable domain of SEQ ID NO: 502 and light chain variable domain that is not one of SEQ ID NOs: 550, 554, 556-560, 562, 565, 569, 570-576, 697-713, and 732.

29. The ABPC of any one of claims 21-28, wherein a composition comprising the ABPC provides for:
an increase in toxin liberation in the target mammalian cell as compared to a composition comprising the same amount of a control ABPC; and/or
an increase in target mammalian cell killing as compared to a composition comprising the same amount of a control ABPC.

30. The ABPC of any one of claims 21-29, wherein a composition comprising the ABPC provides for an increase in endolysosomal delivery in the target mammalian cell as compared to a composition comprising the same amount of a control ABPC.

31. The ABPC of any one of claims 21-30, wherein a composition comprising the ABPC:
results in a less of a reduction in the level of MET presented on the surface of the target mammalian cell as compared to a composition comprising the same amount of a control ABPC; or
does not result in a detectable reduction in the level of MET presented on the surface of the target mammalian cell.

32. The ABPC of any one of claims 21-31, wherein the target mammalian cell is a cancer cell.

33. The ABPC of any one of claims 21-32, wherein the ABPC is cytotoxic or cytostatic to the target mammalian cell.

34. The ABPC of any one of claims 21-33, wherein the ABPC is:
cross-reactive with a non-human primate MET and human MET; or
cross-reactive with a non-human primate MET, a human MET, and one or both of rat MET and a mouse MET.

35. The ABPC of any one of claims 21-34, wherein the ABPC comprises a single polypeptide.

36. The ABPC of claim 35, wherein the antigen-binding domain is selected from the group consisting of: a VH domain, a VHH domain, a VNAR domain, and a scFv.

37. The ABPC of any one of claims 21-34, wherein the ABPC comprises two or more polypeptides.

38. The ABPC of claim 37, wherein the ABPC is an antibody.

39. The ABPC of any of claims 21-38, wherein the half-life of the ABPC in vivo is decreased as compared to the half-life of a control ABPC in vivo.

40. The ABPC of any one of claims 21-39, wherein the ABPC further comprises a second antigen-binding domain.

41. A kit comprising at least one dose of the pharmaceutical composition of any one of claims 1-20 or the ABPC of any one of claims 21-40.

42. A method of treating a cancer characterized by having a population of cancer cells that have MET or an epitope of MET presented on their surface, the method comprising:
administering a therapeutically effective amount of the pharmaceutical composition of any one of claims 1-20 or the ABPC of any one of claims 21-40 to a subject identified as having a cancer characterized by having the population of cancer cells.

43. A method of reducing the volume of a tumor in a subject, wherein the tumor is characterized by having a population of cancer cells that have MET or an epitope of MET presented on their surface, the method comprising:
administering a therapeutically effective amount of the pharmaceutical composition of any one of claims 1-20 or the ABPC of any one of claims 21-40 to a subject identified as having a cancer characterized by having the population of cancer cells.

44. A method of inducing cell death in a cancer cell in a subject, wherein the cancer cell has MET or an epitope of MET presented on its surface, wherein the method comprises:
administering a therapeutically effective amount of the pharmaceutical composition of any one of claims 1-20 or the ABPC of any one of claims 21-40 to a subject identified as having a cancer characterized by having a population of the cancer cells.

45. A method of decreasing the risk of developing a metastasis or decreasing the risk of developing an additional metastasis in a subject having a cancer, wherein the cancer is characterized by having a population of cancer cells that have MET or an epitope of MET presented on their surface the method comprising:
administering a therapeutically effective amount of the pharmaceutical composition of any one of claims 1-20 or the ABPC of any one of claims 21-40 to a subject identified as having a cancer characterized by having the population of cancer cells.
